(19) United States
(12) Patent Application Publication
(10) Pub. No.: US 2020/0369781 A1
(43) Pub. Date: Nov. 26, 2020

(54) POLYPEPTIDE INCLUDING ANTIGEN-BINDING DOMAIN AND CARRYING SECTION

(71) Applicant: Chugai Seiyaku Kabushiki Kaisha, Tokyo (JP)

(72) Inventors: Tomoyuki IGAWA, Shizuoka (JP); Hiroyuki ISHIKAWA, Shizuoka (JP); Naoka HIRONIWA, Shizuoka (JP); Tatsuya KAWA, Shizuoka (JP)

(21) Appl. No.: 16/767,085

(22) PCT Filed: Nov. 28, 2018
(86) PCT No.: PCT/JP2018/043664

§ 371 Date: May 26, 2020

(30) Foreign Application Priority Data
Nov. 28, 2017 (JP) 2017-227650
May 30, 2018 (JP) 2018-103682

(51) Int. Cl. C07K 16/30; C07K 16/32; C07K 16/28

(52) U.S. Cl. CPC C07K 16/303; C07K 16/32; C07K 16/2866; C07K 2317/31; C07K 2317/569; C07K 2317/515; C07K 2317/52; C07K 16/2809

(57) ABSTRACT

The present invention relates to polypeptides containing an antigen-binding domain and a carrying moiety having an inhibiting domain that inhibits the antigen-binding activity of the antigen-binding domain, and having a longer half-life than that of the antigen-binding domain existing alone; methods for producing and screening for the polypeptides; pharmaceutical compositions containing the polypeptide; methods for producing and screening for a single-domain antibody whose antigen-binding activity is inhibited by its association with particular VL, VH or VHH; and fusion polypeptide libraries including a single-domain antibody whose antigen-binding activity is inhibited by its association with particular VL, VH or VHH.

### TECHNICAL FIELD

[0001] The present invention relates to polypeptides comprising an antigen-binding domain and a carrying moiety having an inhibiting domain that inhibits the antigen-binding activity of the antigen-binding domain, and having a longer half-life than the half-life of the antigen-binding domain which exists alone, methods for producing and screening for the polypeptides, pharmaceutical compositions comprising the polypeptide, methods for producing and screening for a single-domain antibody whose antigen-binding activity can be inhibited by its association with particular VL, VH or VHH, and libraries of fusion polypeptides each comprising a single-domain antibody whose antigen-binding activity can be inhibited by its association with particular VL, VH or VHH.

### BACKGROUND ART

[0002] Antibodies have received attention as drugs because of being highly stable in plasma and causing little side effects. Among them, many IgG-type antibody drugs have been launched, and a large number of antibody drugs are currently under development (NPLs 1 and 2).

[0003] Rituxan against CD20, cetuximab against EGFR, Herceptin against HER2, and the like have been approved so far as therapeutic drugs for cancer using antibody drugs (NPL 3). These antibody molecules bind to their antigens expressed on cancer cells and thereby exert cytotoxic activity against the cancer cells through ADCC activity, etc. Such cytotoxic activity based on ADCC activity, etc. is known to depend on the number of antigens expressed on target cells of therapeutic antibodies (NPL 4). Therefore, high expression levels of targeted antigens are preferred from the viewpoint of the effects of therapeutic antibodies. However, if an antigen, albeit having a high expression level, is expressed in normal tissues, the cytotoxic activity based on ADCC activity, etc. is exerted against the normal cells. Hence, side effects become a serious problem. Therefore, it is preferred that antigens targeted by therapeutic antibodies as therapeutic drugs for cancer should be expressed specifically on cancer cells. For example, an antibody molecule against EpCAM known as a cancer antigen had been considered promising as a therapeutic drug for cancer. However, the EpCAM is known to be also expressed in the pancreas. In actuality, it has been reported in clinical trials that the administration of an anti-EpCAM antibody causes pancreatitis as a side effect due to cytotoxic activity against the pancreas (NPL 5).

[0004] In the wake of the success of antibody drugs exerting cytotoxic activity based on ADCC activity, second-generation improved antibody molecules exerting strong cytotoxic activity have been reported as a result of, for example, enhancing ADCC activity by the removal of fucose from the N-linked oligosaccharide of a native human IgG1 Fc region (NPL 6) or enhancing ADCC activity by enhancing binding to FcγRIIIa through the amino acid substitution of a native human IgG1 Fc region (NPL 7). Improved antibody molecules exerting stronger cytotoxic activity, such as an antibody drug conjugate (ADC) containing an antibody conjugated with a drug having strong cytotoxic activity (NPL 8), and a low-molecular antibody exerting cytotoxic activity against cancer cells by recruiting T cells to the cancer cells (NPL 9) have also been reported as antibody drugs exerting cytotoxic activity against cancer cells under a mechanism other than NK cell-mediated ADCC activity as mentioned above.

[0005] Such antibody molecules exerting stronger cytotoxic activity can exert cytotoxic activity even against cancer cells expressing an antigen at a level that is not high, but also exert cytotoxic activity against normal tissues expressing the antigen at a low level, similarly to cancer cells. In actuality, EGFR-BiTE, a bispecific antibody against CD3 and EGFR, can exert strong cytotoxic activity against cancer cells and exert an antitumor effect, by recruiting T cells to the cancer cells, as compared with cetuximab, native human IgG1 against the EGFR. On the other hand, it has also been found that serious side effects appear by the administration of EGFR-BiTE to cynomolgus monkeys, because EGFR is also expressed in normal tissues (NPL 10). Also, ADC bivatuzumab mertansine containing mertansine conjugated with an antibody against CD44v6 highly expressed on cancer cells has been clinically found to cause severe dermal toxicity and hepatoxicity, because CD44v6 is also expressed in normal tissues (NPL 11).

[0006] As mentioned above, use of an antibody that can exert strong cytotoxic activity even against cancer cells expressing an antigen at low levels requires the target antigen to be expressed in an exceedingly cancer-specific manner. However, considering that a target antigen HER2 of Herceptin or a target antigen EGFR of cetuximab is also expressed in normal tissues, only a limited number of cancer antigens may be expressed in an exceedingly cancer-specific manner. Therefore, side effects ascribable to a cytotoxic effect on normal tissues may become a problem, though cytotoxic activity against cancer can be enhanced.

[0007] Recently, ipilimumab, which enhances tumor immunity by inhibiting CTLA4 contributing to immunosuppression in cancer, has been shown to extend overall survival in metastatic melanoma (NPL 12). However, ipilimumab systemically inhibits CTLA4 and therefore causes autoimmune disease-like severe side effects due to the systemic activation of immunity, though enhancing the tumor immunity (NPL 13).

[0008] Meanwhile, antibody drugs exerting a therapeutic effect by inhibiting inflammatory cytokines in inflammatory or autoimmune diseases are known as antibody drugs against diseases other than cancer (NPL 14). It is known that, for example, Remicade or Humira targeting TNF, and Actemra targeting IL-6R exert a high therapeutic effect on rheumatoid arthritis, whereas infectious disease is seen as a side effect due to the systemic neutralization of these cytokines (NPL 15).

[0009] Various techniques have been developed as techniques applicable to second-generation antibody drugs. For example, techniques of improving effector functions, antigen-binding ability, pharmacokinetics, or stability or reducing a risk of immunogenicity have been reported (NPL 16). However, there are still a few reports on techniques that allow antibody drugs to act specifically on a target tissue in order to solve side effects as described above. The reported techniques include a method which involves connecting an antibody to a masking peptide via a linker that is cleaved by protease expressed at a lesion site such as a cancer tissue or an inflammatory tissue, thereby masking the antigen-binding site of the antibody with the masking peptide and inhibiting the antigen-binding activity of the antibody; and dissociating the masking peptide therefrom by the protease cleavage of this linker so that the antibody restores its antigen-binding activity and becomes capable of binding to the antigen in a target pathological tissue (NPLs 17 and 18 and PTL 1).

### CITATION LIST

### Patent Literature

[0010] [PTL 1] WO 2010/081173

### Non Patent Literature

[0011] [NPL 1] Monoclonal antibody successes in the clinic. Janice M Reichert, Clark J Rosensweig, Laura B Faden & Matthew C Dewitz, Nat. Biotechnol. (2005) 23, 1073-1078
[0012] [NPL 2] The therapeutic antibodies market to 2008. Pavlou A K, Belsey M J., Eur. J. Pharm. Biopharm. (2005) 59 (3), 389-396
[0013] [NPL 3] Monoclonal antibodies: versatile platforms for cancer immunotherapy. Weiner L M, Surana R, Wang S., Nat. Rev. Immunol. (2010) 10 (5), 317-327
[0014] [NPL 4] Differential responses of human tumor cell lines to anti-p185HER2 monoclonal antibodies. Lewis G D, Figari I, Fendly B, Wong W L, Carter P, Gorman C, Shepard H M, Cancer Immunol. Immunotherapy (1993) 37, 255-263
[0015] [NPL 5] ING-1, a monoclonal antibody targeting Ep-CAM in patients with advanced adenocarcinomas. de Bono J S, Tolcher A W, Forero A, Vanhove G F, Takimoto C, Bauer R J, Hammond L A, Patnaik A, White M L, Shen S, Khazaeli M B, Rowinsky E K, LoBuglio A F, Clin. Cancer Res. (2004) 10 (22), 7555-7565
[0016] [NPL 6] Non-fucosylated therapeutic antibodies as next-generation therapeutic antibodies. Satoh M, Iida S, Shitara K., Expert Opin. Biol. Ther. (2006) 6 (11), 1161-1173
[0017] [NPL 7] Optimizing engagement of the immune system by anti-tumor antibodies: an engineer's perspective. Desjarlais J R, Lazar G A, Zhukovsky E A, Chu S Y., Drug Discov. Today (2007) 12 (21-22), 898-910
[0018] [NPL 8] Antibody-drug conjugates: targeted drug delivery for cancer. Alley S C, Okeley N M, Senter P D., Curr. Opin. Chem. Biol. (2010) 14 (4), 529-537
[0019] [NPL 9] BiTE: Teaching antibodies to engage T-cells for cancer therapy. Baeuerle P A, Kufer P, Bargou R., Curr. Opin. Mol. Ther. (2009) 11 (1), 22-30
[0020] [NPL 10] T cell-engaging BiTE antibodies specific for EGFR potently eliminate KRAS- and BRAF-mutated colorectal cancer cells. Lutterbuese R, Raum T, Kischel R, Hoffmann P, Mangold S, Rattel B, Friedrich M, Thomas 0, Lorenczewski G, Rau D, Schaller E, Herrmann I, Wolf A, Urbig T, Baeuerle P A, Kufer P., Proc. Natl. Acad. Sci. U.S.A. (2010) 107 (28), 12605-12610
[0021] [NPL 11] Phase I trial with the CD44v6-targeting immunoconjugate bivatuzumab mertansine in head and neck squamous cell carcinoma. Riechelmann H, Sauter A, Golze W, Hanft G, Schroen C, Hoermann K, Erhardt T, Gronau S., Oral Oncol. (2008) 44 (9), 823-829
[0022] [NPL 12] Ipilimumab in the treatment of melanoma. Trinh V A, Hwu W J., Expert Opin. Biol. Ther., (2012) April 14 (doi: 10.1517/14712598.2012.675325)
[0023] [NPL 13] IPILIMUMAB—A NOVEL IMMUNOMODULATING THERAPY CAUSING AUTOIMMUNE HYPOPHYSITIS: A CASE REPORT AND REVIEW. Juszczak A, Gupta A, Karavitaki N, Middleton M R, Grossman A., Eur. J. Endocrinol. (2012) April 10 (doi: 10.1530/EJE-12-0167)
[0024] [NPL 14] The Japanese experience with biologic therapies for rheumatoid arthritis. Takeuchi T, Kameda H., Nat. Rev. Rheumatol. (2010) 6 (11), 644-652
[0025] [NPL 15] Current evidence for the management of rheumatoid arthritis with biological disease-modifying antirheumatic drugs: a systematic literature review informing the EULAR recommendations for the management of R A. Nam J L, Winthrop K L, van Vollenhoven R F, Pavelka K, Valesini G, Hensor E M, Worthy G, Landewe R, Smolen J S, Emery P, Buch M H., Ann. Rheum. Dis. (2010) 69 (6), 976-986
[0026] [NPL 16] Antibody engineering for the development of therapeutic antibodies. Kim S J, Park Y, Hong H J., Mol. Cells. (2005) 20 (1), 17-29
[0027] [NPL 17] Tumor-specific activation of an EGFR-targeting probody enhances therapeutic index. Desnoyers L R, Vasiljeva O, Richardson J H, Yang A, Menendez E E, Liang T W, Wong C, Bessette P H, Kamath K, Moore S J, Sagert J G, Hostetter D R, Han F, Gee J, Flandez J, Markham K, Nguyen M, Krimm M, Wong K R, Liu S, Daugherty P S, West J W, Lowman H B. Sci Transl Med. 2013 Oct. 16; 5(207): 207ra144.
[0028] [NPL 18] Probody therapeutics for targeting antibodies to diseased tissue. Polu K R, Lowman H B. Expert Opin Biol Ther. 2014 August; 14(8): 1049-53.

### SUMMARY OF INVENTION

### Technical Problem

[0029] The present inventors have thought that the techniques of dissociating, by protease cleavage, a masking peptide inhibiting the antigen-binding activity of an antibody so that the antibody restores its antigen-binding activity, as described above might cause side effects, because the antibody cleaved at a lesion site may distribute to normal tissues through blood flow, as the cleavage by protease is irreversible.

[0030] The present invention has been made on the basis of such an idea. An object of the present invention is to provide a pharmaceutical composition useful in disease treatment with less side effects, and an active ingredient thereof. Another object of the present invention is to provide methods for screening for and producing the pharmaceutical composition and the active ingredient.

### Solution to Problem

[0031] The present inventors have conducted diligent studies and consequently developed polypeptides comprising an antigen-binding domain and a carrying moiety having an inhibiting domain that inhibits the binding activity of the antigen-binding domain, and having a longer half-life than the half-life of the antigen-binding domain which exists alone. It is considered that use of the polypeptide can allow the antigen-binding domain to restore its antigen-binding activity in a disease tissue(s) and exert the antigen-binding activity in the disease tissue(s). Furthermore, the systemic distribution of an activated form of the antigen-binding domain can be suppressed owing to the difference in half-lives between the polypeptide comprising the antigen-binding domain whose antigen-binding activity is inhibited and a polypeptide comprising the antigen-binding domain whose antigen-binding activity is restored. Moreover, the present inventors have found that the polypeptides or pharmaceutical compositions comprising the polypeptide are useful in disease treatment and also found that the polypeptides or the pharmaceutical compositions are useful in disease treatment which involves administering the polypeptide; and that the polypeptides are useful in the production of a drug for disease treatment. The present inventors have further developed methods for screening for and producing the polypeptide, methods for producing and screening for a single-domain antibody whose antigen-binding activity can be inhibited by its association with particular VL, VH or VHH, and libraries including a single-domain antibody whose antigen-binding activity can be inhibited by its association with particular VL, VH or VHH, and completed the present invention.

[0032] The present invention is based on these findings and specifically encompasses exemplary embodiments described below.
[0033] (1) A polypeptide comprising an antigen-binding domain and a carrying moiety, the carrying moiety having an inhibiting domain that inhibits the antigen-binding activity of the antigen-binding domain, and the antigen-binding domain having a shorter half-life in blood than that of the carrying moiety.
[0034] (2) The polypeptide according to (1), wherein the molecular weight of the antigen-binding domain is smaller than that of the carrying moiety.
[0035] (3) The polypeptide according to (1) or (2), wherein the molecular weight of the antigen-binding domain is 60 kDa or smaller.
[0036] (4) The polypeptide according to any of (1) to (3), wherein the carrying moiety has FcRn-binding activity, and the antigen-binding domain has no FcRn-binding activity or has weaker FcRn-binding activity than that of the carrying moiety.
[0037] (5) The polypeptide according to any of (1) to (4), wherein the antigen-binding domain is capable of being released from the polypeptide, and the antigen-binding domain released from the polypeptide has higher antigen-binding activity than that before the release.
[0038] (6) The polypeptide according to any of (1) to (5), wherein the inhibiting domain of the carrying moiety is associated with the antigen-binding domain and thereby inhibits the antigen-binding activity of the antigen-binding domain.
[0039] (7) The polypeptide according to (5), wherein the polypeptide comprises a cleavage site, wherein the cleavage site is cleaved so that the antigen-binding domain becomes capable of being released from the polypeptide.
[0040] (8) The polypeptide according to (6), wherein the polypeptide comprises a cleavage site, wherein the cleavage site is cleaved so that the association of the inhibiting domain of the carrying moiety with the antigen-binding domain is canceled.
[0041] (9) The polypeptide according to (7) or (8), wherein the cleavage site comprises a protease cleavage sequence.
[0042] (10) The polypeptide according to (9), wherein the protease is a target tissue specific protease.
[0043] (11) The polypeptide according to (10), wherein the target tissue is a cancer tissue or an inflammatory tissue.
[0044] (12) The polypeptide according to (9), wherein the protease is at least one protease selected from matriptase, urokinase (uPA), and metalloproteinase.
[0045] (13) The polypeptide according to (12), wherein the protease is at least one protease selected from MT-SP1, uPA, MMP-2, MMP-9, ADAMTS5, MMP-7, and MMP-13.
[0046] (14) The polypeptide according to (9), wherein the protease cleavage sequence comprises one or a plurality of sequence sequences selected from the sequences of SEQ ID NOs: 12, 25, 34, 35, 70 to 73, 75, 76, 91, 168 to 178, 193 to 195, 833 to 852, and 1062 to 1081, and the sequences shown in Table 1.
[0047] (15) The polypeptide according to any of (9) to (14), wherein a first flexible linker is further attached to one end of the protease cleavage sequence.
[0048] (16) The polypeptide according to (15), wherein a second flexible linker is further attached to the other end of the protease cleavage sequence.
[0049] (17) The polypeptide according to (15), wherein the first flexible linker is a flexible linker consisting of a glycine-serine polymer.
[0050] (18) The polypeptide according to (16), wherein the second flexible linker is a flexible linker consisting of a glycine-serine polymer.
[0051] (19) The polypeptide according to any of (1) to (18), wherein the antigen-binding domain comprises a single-domain antibody or is a single-domain antibody, wherein the inhibiting domain of the carrying moiety inhibits the antigen-binding activity of the single-domain antibody.
[0052] (20) The polypeptide according to (19), wherein the single-domain antibody is VHH, VH having antigen-binding activity by itself, or VL having antigen-binding activity by itself.
[0053] (21) The polypeptide according to any of (1) to (20), wherein the antigen-binding domain comprises a single-domain antibody, and the inhibiting domain of the carrying moiety is VHH, antibody VH, or antibody VL, wherein the antigen-binding activity of the single-domain antibody is inhibited by the VHH, the antibody VH, or the antibody VL.
[0054] (22) The polypeptide according to any of (1) to (21), wherein the antigen-binding domain comprises a single-domain antibody, and the inhibiting domain of the carrying moiety is VHH, antibody VH, or antibody VL, wherein the antigen-binding activity of the single-domain antibody is inhibited by its association with the VHH, the antibody VH, or the antibody VL.
[0055] (23) The polypeptide according to any of (19) to (22), wherein the single-domain antibody is VHH or VH having antigen-binding activity by itself, and the inhibiting domain of the carrying moiety is antibody VL, wherein the antigen-binding activity of the VHH or the VH having antigen-binding activity by itself is inhibited by its association with the antibody VL.
[0056] (24) The polypeptide according to any of (19) to (23), wherein the single-domain antibody is VHH, wherein the VHH has an amino acid substitution at at least one position selected from amino acid positions 37, 44, 45, and 47 (all according to the Kabat numbering).
[0057] (25) The polypeptide according to any of (19) to (23), wherein the single-domain antibody is VHH, wherein the VHH contains at least one amino acid selected from amino acids 37V, 44G, 45L, and 47W (all according to the Kabat numbering).
[0058] (26) The polypeptide according to any of (19) to (23), wherein the single-domain antibody is VHH, wherein the VHH contains at least one amino acid substitution selected from amino acid substitutions F37V, Y37V, E44G, Q44G, R45L, H45L, G47W, F47W, L47W, T47W, and S47W (all according to the Kabat numbering).
[0059] (27) The polypeptide according to any of (19) to (23), wherein the single-domain antibody is VHH, wherein the VHH has amino acid substitutions at at least one set of positions selected from positions 37/44, positions 37/45, positions 37/47, positions 44/45, positions 44/47, positions 45/47, positions 37/44/45, positions 37/44/47, positions 37/45/47, positions 44/45/47, and positions 37/44/45/47 (all according to the Kabat numbering).
[0060] (28) The polypeptide according to any of (19) to (23), wherein the single-domain antibody is VHH, wherein the VHH contains at least one set of amino acids selected from 37V/44G, 37V/45L, 37V/47W, 44G/45L, 44G/47W, 45L/47W, 37V/44G/45L, 37V/44G/47W, 37V/45L/47W, 44G/45L/47W, and 37V/44G/45L/47W (all according to the Kabat numbering).
[0061] (29) The polypeptide according to any of (19) to (23), wherein the single-domain antibody is VHH, wherein the VHH contains at least one set of amino acid substitutions selected from F37V/R45L, F37V/G47W, R45L/G47W, and F37V/R45L/G47W (all according to the Kabat numbering).
[0062] (30) The polypeptide according to any of (19) to (22), wherein the single-domain antibody is VL having antigen-binding activity by itself, and the inhibiting domain of the carrying moiety is antibody VH, wherein the antigen-binding activity of the VL having antigen-binding activity by itself is inhibited by its association with the antibody VH.
[0063] (31) The polypeptide according to any of (1) to (30), wherein the carrying moiety has an FcRn binding region.
[0064] (32) The polypeptide according to any of (1) to (31), wherein the carrying moiety comprises an antibody constant region.
[0065] (33) The polypeptide according to (32), wherein the antibody constant region of the carrying moiety and the antigen-binding domain are fused via a linker or without a linker.
[0066] (34) The polypeptide according to (32), wherein the carrying moiety comprises an antibody heavy chain constant region, wherein the antibody heavy chain constant region and the antigen-binding domain are fused via a linker or without a linker.
[0067] (35) The polypeptide according to (32), wherein the carrying moiety comprises an antibody light chain constant region, wherein the antibody light chain constant region and the antigen-binding domain are fused via a linker or without a linker.
[0068] (36) The polypeptide according to (34), wherein in the polypeptide, the N terminus of the antibody heavy chain constant region of the carrying moiety and the C terminus of the antigen-binding domain are fused via a linker or without a linker, and the polypeptide further has a protease cleavage sequence, wherein the protease cleavage sequence is located within the sequence of the antigen-binding domain, or in the antibody heavy chain constant region on the side closer to the antigen-binding domain beyond the amino acid of position 122 (EU numbering).
[0069] (37) The polypeptide according to (35), wherein in the polypeptide, the N terminus of the antibody light chain constant region of the carrying moiety and the C terminus of the antigen-binding domain are fused via a linker or without a linker, and the polypeptide further has a protease cleavage sequence, wherein the protease cleavage sequence is located within the sequence of the antigen-binding domain, or in the antibody light chain constant region on the side closer to the antigen-binding domain beyond the amino acid of position 113 (EU numbering) (Kabat numbering position 113).
[0070] (38) The polypeptide according to any of (33) to (35), wherein in the polypeptide, the N terminus of the antibody constant region of the carrying moiety and the C terminus of the antigen-binding domain are fused via a linker or without a linker, the antigen-binding domain is a single-domain antibody prepared from VH, or VHH, and the polypeptide further has a protease cleavage sequence, wherein the protease cleavage sequence is located within the sequence of the antibody constant region, or in the single-domain antibody of the antigen-binding domain on the side closer to antibody constant region beyond the amino acid position of 109 (Kabat numbering).
[0071] (39) The polypeptide according to (33), wherein in the polypeptide, the N terminus of the antibody constant region of the carrying moiety and the C terminus of the antigen-binding domain are fused via a linker or without a linker, and the polypeptide further has a protease cleavage sequence, wherein the protease cleavage sequence is located near the boundary between the antigen-binding domain and the antibody constant region.
[0072] (40) The polypeptide according to (34), wherein in the polypeptide, the N terminus of the antibody heavy chain constant region of the carrying moiety and the C terminus of the antigen-binding domain are fused via a linker or without a linker, and the polypeptide further has a protease cleavage sequence, wherein the protease cleavage sequence is located near the boundary between the antigen-binding domain and the antibody heavy chain constant region.
[0073] (41) The polypeptide according to (35), wherein in the polypeptide, the N terminus of the antibody light chain constant region of the carrying moiety and the C terminus of the antigen-binding domain are fused via a linker or without a linker, and the polypeptide further has a protease cleavage sequence, wherein the protease cleavage sequence is located near the boundary between the antigen-binding domain and the antibody light chain constant region.
[0074] (42) The polypeptide according to (40), wherein the antigen-binding domain is a single-domain antibody prepared from VH, or VHH, and the protease cleavage sequence is located at any position between the amino acid position of 109 (Kabat numbering) of the single-domain antibody of the antigen-binding domain and the amino acid of position 122 (EU numbering) of the antibody heavy chain constant region.
[0075] (43) The polypeptide according to (41), wherein the antigen-binding domain is a single-domain antibody prepared from VH, or VHH, and the protease cleavage sequence is located at any position between the amino acid of position 109 (Kabat numbering) of the single-domain antibody of the antigen-binding domain and the amino acid of position 113 (EU numbering) (Kabat numbering position 113) of the antibody light chain constant region.
[0076] (44) The polypeptide according to (40), wherein the antigen-binding domain is a single-domain antibody prepared from VL, and the protease cleavage sequence is located at any position between the amino acid of position 104 (Kabat numbering) of the single-domain antibody of the antigen-binding domain and the amino acid of position 122 (EU numbering) of the antibody heavy chain constant region.
[0077] (45) The polypeptide according to (41), wherein the antigen-binding domain is a single-domain antibody prepared from VL, and the protease cleavage sequence is located at any position between the amino acid of position 109 (Kabat numbering) of the single-domain antibody of the antigen-binding domain and the amino acid of position 113 (EU numbering) (Kabat numbering position 113) of the antibody light chain constant region.
[0078] (46) The polypeptide according to any of (32) to (45), wherein the antibody constant region of the polypeptide is an IgG antibody constant region.
[0079] (47) The polypeptide according to any of (1) to (46), wherein the polypeptide is an IgG antibody-like molecule.
[0080] (48) The polypeptide according to any of (1) to (47), wherein when the antigen-binding domain is assayed in an unreleased state by use of BLI (bio-layer interferometry) (Octet), the binding of the antigen-binding domain to the antigen is not seen.
[0081] (49) The polypeptide according to any of (1) to (48), wherein a second antigen-binding domain is further linked to the antigen-binding domain.
[0082] (50) The polypeptide according to (49), wherein the second antigen-binding domain has antigen-binding specificity different from that of the antigen-binding domain.
[0083] (51) The polypeptide according to (49) or (50), wherein the second antigen-binding domain comprises a second single-domain antibody.
[0084] (52) The polypeptide according to (51), wherein the antigen-binding domain is a single-domain antibody, the second antigen-binding domain is a second single-domain antibody, and the antigen-binding domain and the second antigen-binding domain are capable of being released from the polypeptide, wherein the single-domain antibody and the second single-domain antibody form a bispecific antigen-binding molecule in released states of the antigen-binding domain and the second antigen-binding domain.
[0085] (53) The polypeptide according to any of (49) to (52), wherein the second antigen-binding domain is directed to HER2 or GPC3 as a target antigen.
[0086] (54) The polypeptide according to any of (1) to (53), wherein the polypeptide further has an additional antigen-binding domain different from the antigen-binding domain, wherein the antigen-binding activity of the additional antigen-binding domain is also inhibited by its linkage to the carrying moiety of the polypeptide.
[0087] (55) The polypeptide according to (54), wherein the additional antigen-binding domain and the antigen-binding domain differ in antigen-binding specificity.
[0088] (56) The polypeptide according to any of (1) to (55), wherein the antigen-binding domain is an antigen-binding domain directed to Plexin A1, IL-6R or CD3 as a target antigen.
[0089] (57) A pharmaceutical composition comprising the polypeptide of any of (1) to (56).
[0090] (58) A method for producing the polypeptide of any of (1) to (56).
[0091] (59) The production method according to (58), comprising the following steps:
   [0092] (a) obtaining a single-domain antibody binding to a target antigen;
   [0093] (b) linking the single-domain antibody obtained in the step (a) to a carrying moiety such that the antigen-binding activity of the single-domain antibody is inhibited by an inhibiting domain of the carrying moiety, to form a polypeptide precursor; and
   [0094] (c) introducing a protease cleavage sequence into the polypeptide precursor.
[0095] (60) The production method according to (58), comprising the following steps:
   [0096] (a) obtaining a single-domain antibody binding to a target antigen;
   [0097] (b) linking the single-domain antibody obtained in the step (a) to a carrying moiety such that the antigen-binding activity of the single-domain antibody is inhibited by an inhibiting domain of the carrying moiety, to form a polypeptide precursor; and
   [0098] (c) introducing a protease cleavage sequence to near the boundary between the single-domain antibody and the carrying moiety.
[0099] (61) The production method according to (58), comprising the following steps:
   [0100] (a) obtaining a single-domain antibody binding to a target antigen; and
   [0101] (b) linking the single-domain antibody obtained in the step (a) to a carrying moiety via a protease cleavage sequence such that the antigen-binding activity of the single-domain antibody is inhibited by an inhibiting domain of the carrying moiety, to form a polypeptide.
[0102] (62) The production method according to any of (59) to (61), further comprising the following step:
   [0103] (d) confirming that the binding activity of the single-domain antibody incorporated in the polypeptide or the polypeptide precursor against the target antigen is weakened or lost.
[0104] (63) The production method according to any of (59) to (62), further comprising the following step:
   [0105] (e) releasing the single-domain antibody by the protease cleavage of the protease cleavage sequence and confirming that the released single-domain antibody binds to the antigen.
[0106] (64) The production method according to (58), wherein the polypeptide is an IgG antibody-like molecule.
[0107] (65) The production method according to (64), comprising the following steps:
   [0108] (a) obtaining a single-domain antibody binding to a target antigen;
   [0109] (b) allowing the single-domain antibody obtained in the step (a) to be associated with a VL as a substitute for VH of an IgG antibody, or allowing the single-domain antibody to be associated with a VH as a substitute for VL of an IgG antibody such that the antigen-binding activity of the single-domain antibody is inhibited, to form an IgG antibody-like molecule precursor harboring the single-domain antibody; and
   [0110] (c) introducing a protease cleavage sequence into the IgG antibody-like molecule precursor harboring the single-domain antibody.
[0111] (66) The production method according to (64), comprising the following steps:
   [0112] (a) obtaining a single-domain antibody binding to a target antigen;
   [0113] (b) allowing the single-domain antibody obtained in the step (a) to be associated with a VL as a substitute for VH of an IgG antibody, or allowing the single-domain antibody to be associated with a VH as a substitute for VL of an IgG antibody such that the antigen-binding activity of the single-domain antibody is inhibited, to form an IgG antibody-like molecule precursor harboring the single-domain antibody; and
   [0114] (c) introducing a protease cleavage sequence to near the boundary between the single-domain antibody and an antibody constant region in the IgG antibody-like molecule precursor.
[0115] (67) The production method according to (64), comprising the following steps:
   [0116] (a) obtaining a single-domain antibody binding to a target antigen; and
   [0117] (b) linking the single-domain antibody obtained in the step (a) as a substitute for IgG antibody VH or VL to an IgG antibody heavy chain constant region or light chain constant region via a protease cleavage sequence such that the antigen-binding activity of the single-domain antibody is inhibited, to form an IgG antibody-like molecule harboring the single-domain antibody.
[0118] (68) The production method according to any of (65) to (67), further comprising the following step:
   [0119] (d) confirming that the binding activity of the single-domain antibody harbored in the IgG antibody-like molecule or the IgG antibody-like molecule precursor against the target antigen is weakened or lost.
[0120] (69) The production method according to any of (65) to (68), further comprising the following step:
   [0121] (e) releasing the single-domain antibody by the protease cleavage of the protease cleavage sequence and confirming that the released single-domain antibody binds to the target antigen.
[0122] (70) The production method according to (64), comprising the following steps:
   [0123] (a) substituting an amino acid residue in a single-domain antibody that is involved in association of the single-domain antibody with antibody VH, or substituting an amino acid residue in a single-domain antibody that is involved in association of the single-domain antibody with antibody VL, to prepare a variant single-domain antibody retaining the binding activity of the single-domain antibody against the target antigen;
   [0124] (b) allowing the variant single-domain antibody prepared in the step (a) to be associated with antibody VH, or allowing the variant single-domain antibody to be associated with antibody VL such that the antigen-binding activity of the variant single-domain antibody is inhibited, to form an IgG antibody-like molecule precursor harboring the variant single-domain antibody; and
   [0125] (c) introducing a protease cleavage sequence into the IgG antibody-like molecule precursor harboring the variant single-domain antibody.
[0126] (71) The production method according to (64), comprising the following steps:
   [0127] (a) substituting an amino acid residue in a single-domain antibody that is involved in association with antibody VH, or substituting an amino acid residue in a single-domain antibody that is involved in association with antibody VL, to prepare a variant single-domain antibody retaining the binding activity of the single-domain antibody against the target antigen;
   [0128] (b) allowing the variant single-domain antibody prepared in the step (a) to be associated with antibody VH, or allowing the variant single-domain antibody to be associated with antibody VL such that the antigen-binding activity of the variant single-domain antibody is inhibited, to form an IgG antibody-like molecule precursor harboring the variant single-domain antibody; and
   [0129] (c) introducing a protease cleavage sequence to near the boundary between the variant single-domain antibody and a constant region in the IgG antibody-like molecule precursor.
[0130] (72) The production method according to (64), comprising the following steps:
   [0131] (a) substituting an amino acid residue in a single-domain antibody that is involved in association with antibody VH, or substituting an amino acid residue in a single-domain antibody that is involved in association with antibody VL, to prepare a variant single-domain antibody retaining the binding activity of the single-domain antibody against the target antigen; and
   [0132] (b) linking the variant single-domain antibody prepared in the step (a) to an IgG antibody heavy chain constant region via a protease cleavage sequence, or linking the variant single-domain antibody to an IgG antibody light chain constant region via a protease cleavage sequence such that the antigen-binding activity of the variant single-domain antibody is inhibited, to form an IgG antibody-like molecule harboring the variant single-domain antibody.
[0133] (73) The production method according to any of (70) to (72), further comprising the following step:
   [0134] (d) confirming that the binding activity of the variant single-domain antibody harbored in the IgG antibody-like molecule or the binding activity of the variant single-domain antibody harbored in the IgG antibody-like molecule precursor against the target antigen is weakened or lost.
[0135] (74) The production method according to any of (70) to (73), further comprising the following step:
   [0136] (e) releasing the variant single-domain antibody by cleaving the protease cleavage sequence with a protease and confirming that the released variant single-domain antibody binds to the target antigen.
[0137] (75) A polynucleotide encoding the polypeptide according to any of (1) to (56).
[0138] (76) A vector comprising the polynucleotide according to (75).
[0139] (77) A host cell comprising the polynucleotide according to (75) or the vector according to (76).
[0140] (78) A method for producing the polypeptide according to any of (1) to (56), comprising the step of culturing the host cell according to (77).
[0141] (79) A method for screening for a single-domain antibody whose antigen-binding activity can be inhibited by its association with particular VL, by its association with particular VH, or by its association with particular VHH.
[0142] (80) The screening method according to (79), wherein the method is a method for screening for a single-domain antibody whose antigen-binding activity can be inhibited by its association with particular VL.
[0143] (81) The screening method according to (80), comprising the following steps:
   [0144] (a) obtaining a single-domain antibody having target antigen-binding activity;
   [0145] (b) allowing the single-domain antibody obtained in the step (a) to be associated with a particular VL; and
   [0146] (c) confirming that the binding activity of the single-domain antibody associated with the particular VL in the step (b) against the antigen is weakened as compared with that before the association or lost.
[0147] (82) The screening method according to (80), comprising the following steps:
   [0148] (a) allowing a single-domain antibody to be associated with a particular VL;
   [0149] (b) selecting an association product(s) formed of the VL and the single-domain antibody on the basis that the single-domain antibody associated with the particular VL in the step (a) has no binding activity or binding activity of a predetermined value or lower against the antigen; and
   [0150] (c) confirming that the single-domain antibody in the association product(s) selected in the step (b) has stronger binding activity against the antigen in a state unassociated with the particular VL than that in a state associated therewith.
[0151] (83) The screening method according to (79), wherein the method is a method for screening for a single-domain antibody whose antigen-binding activity can be inhibited by its association with particular VH.
[0152] (84) The screening method according to (83), comprising the following steps:
   [0153] (a) obtaining a single-domain antibody having target antigen-binding activity;
   [0154] (b) allowing the single-domain antibody obtained in the step (a) to be associated with a particular VH; and
   [0155] (c) confirming that the binding activity of the single-domain antibody associated with the particular VH in the step (b) against the antigen is weakened as compared with that before the association or lost.
[0156] (85) The screening method according to (83), comprising the following steps:
   [0157] (a) allowing a single-domain antibody to be associated with a particular VH;
   [0158] (b) selecting an association product(s) formed of the VH and the single-domain antibody on the basis that the single-domain antibody associated with the particular VH in the step (a) has no binding activity or binding activity of a predetermined value or lower against the antigen; and
   [0159] (c) confirming that the single-domain antibody in the association product(s) selected in the step (b) has stronger binding activity against the antigen in a state unassociated with the particular VH than that in a state associated therewith.
[0160] (86) The screening method according to (79), wherein the method is a method for screening for a single-domain antibody whose antigen-binding activity can be inhibited by its association with particular VHH.
[0161] (87) The screening method according to (86), comprising the following steps:
   [0162] (a) obtaining a single-domain antibody having target antigen-binding activity;
   [0163] (b) allowing the single-domain antibody obtained in the step (a) to be associated with a particular VHH; and
   [0164] (c) confirming that the binding activity of the single-domain antibody associated with the particular VHH in the step (b) against the antigen is weakened as compared with that before the association or lost.
[0165] (88) The screening method according to (86), comprising the following steps:
   [0166] (a) allowing a single-domain antibody to be associated with a particular VHH;
   [0167] (b) selecting an association product(s) formed of the VHH and the single-domain antibody on the basis that the single-domain antibody associated with the particular VHH in the step (a) has no binding activity or binding activity of a predetermined value or lower against the antigen; and
   [0168] (c) confirming that the single-domain antibody in the association product(s) selected in the step (b) has stronger binding activity against the antigen in a state unassociated with the particular VHH than that in a state associated therewith.
[0169] (89) A method for producing a single-domain antibody whose antigen-binding activity can be inhibited by its association with particular VL, by its association with particular VH, or by its association with particular VHH.
[0170] (90) The production method according to (89), wherein the method is a method for producing a single-domain antibody whose antigen-binding activity can be inhibited by its association with particular VL.
[0171] (91) The production method according to (90), comprising the following step:
   [0172] (a) substituting an amino acid residue in a single-domain antibody that is involved in association with antibody VL, to prepare a variant single-domain antibody retaining the binding activity of the single-domain antibody against the target antigen.
[0173] (92) The production method according to (91), further comprising the following steps:
   [0174] (b) allowing the variant single-domain antibody prepared in the step (a) to be associated with the VL; and
   [0175] (c) confirming that the antigen-binding activity of the variant single-domain antibody associated with the VL is weakened as compared with that before the association or lost.
[0176] (93) The production method according to (89), wherein the method is a method for producing a single-domain antibody whose antigen-binding activity can be inhibited by its association with particular VH.
[0177] (94) The production method according to (93), comprising the following step:
   [0178] (a) substituting an amino acid residue in a single-domain antibody that is involved in association with the antibody VH, to prepare a variant single-domain antibody retaining the binding activity of the single-domain antibody against the target antigen.
[0179] (95) The production method according to (94), further comprising the following steps:
   [0180] (b) allowing the variant single-domain antibody prepared in the step (a) to be associated with the VH; and
   [0181] (c) confirming that the antigen-binding activity of the variant single-domain antibody associated with the VH is weakened as compared with that before the association or lost.
[0182] (96) The production method according to (89), wherein the method is a method for producing a single-domain antibody whose antigen-binding activity can be inhibited by its association with particular VHH.
[0183] (97) The production method according to (96), comprising the following step:
   [0184] (a) substituting an amino acid residue in a single-domain antibody that is involved in association with VHH, to prepare a variant single-domain antibody retaining the binding activity of the single-domain antibody against the target antigen.
[0185] (98) The production method according to (97), further comprising the following steps:
   [0186] (b) allowing the variant single-domain antibody prepared in the step (a) to be associated with the VHH; and
   [0187] (c) confirming that the antigen-binding activity of the variant single-domain antibody associated with the VHH is weakened as compared with that before the association or lost.
[0188] (99) A library comprising a plurality of fusion polypeptides of single-domain antibodies each linked to a first association sustaining domain, wherein the single-domain antibodies include a single-domain antibody whose antigen-binding activity can be inhibited or lost by its association with particular VL, a single-domain antibody whose antigen-binding activity can be inhibited or lost by its association with particular VH, or a single-domain antibody whose antigen-binding activity can be inhibited or lost by its association with particular VHH.
[0189] (100) The library according to (99), wherein the single-domain antibody moiety in each fusion polypeptide in the library includes a single-domain antibody obtained from an animal of the family Camelidae or a transgenic animal harboring a gene capable of raising the single-domain antibody, or a humanized antibody thereof, a single-domain antibody obtained by the immunization of an animal of the family Camelidae or a transgenic animal harboring a gene capable of raising the single-domain antibody, or a humanized antibody thereof, or an artificially prepared single-domain antibody originating from human antibody VH or VL.
[0190] (101) The library according to (99) or (100) which is a library comprising a plurality of fusion polypeptides of single-domain antibodies each linked to a first association sustaining domain, wherein the single-domain antibodies include a single-domain antibody whose antigen-binding activity can be inhibited or lost by its association with particular VL.
[0191] (102) The library according to (99) or (100) which is a library comprising a plurality of fusion polypeptides of single-domain antibodies each linked to a first association sustaining domain, wherein the single-domain antibody includes a single-domain antibody whose antigen-binding activity can be inhibited or lost by its association with particular VH.
[0192] (103) The library according to (99) or (100) which is a library comprising a plurality of fusion polypeptides of single-domain antibodies each linked to a first association sustaining domain, wherein the single-domain antibody includes a single-domain antibody whose antigen-binding activity can be inhibited or lost by its association with particular VHH.
[0193] (104) A method for screening a library according to (99) or (100) for a fusion polypeptide comprising a single-domain antibody whose antigen-binding activity can be inhibited or could lost by its association with particular VL, a single-domain antibody whose antigen-binding activity can be inhibited or lost by its association with particular VH, or a single-domain antibody whose antigen-binding activity can be inhibited or lost by its association with particular VHH.
[0194] (105) A method for screening a library according to (101) for a fusion polypeptide comprising a single-domain antibody whose antigen-binding activity can be inhibited or could lost by its association with particular VL.
[0195] (106) The screening method according to (105), comprising the following steps:
   [0196] (a) allowing the fusion polypeptides of the library to be displayed in vitro;
   [0197] (b) providing an association partner of a second association sustaining domain fused with a particular VL;
   [0198] (c) allowing each of the fusion polypeptides displayed in the step (a) to be associated with the association partner provided in the step (b) and selecting a fusion polypeptide(s) that does not bind to the antigen or has antigen-binding activity of a predetermined value or lower in a state where the single-domain antibody is associated with the VL; and
   [0199] (d) selecting, from the fusion polypeptide(s) thus selected in the step (c), a fusion polypeptide that binds to the antigen or has antigen-binding activity of a predetermined value or higher in a state where the single-domain antibody contained therein is not associated with the VL.
[0200] (107) The screening method according to (106), wherein the association partner provided in the step (b) further comprises a protease cleavage sequence, and the step (d) comprises cleaving the association partner by protease treatment so that the association of the single-domain antibody with the VL is canceled.
[0201] (108) The screening method according to (107), wherein the protease cleavage sequence of the association partner provided in the step (b) is located near the boundary between the particular VL and the second association sustaining domain.
[0202] (109) The screening method according to (106), wherein the fusion polypeptides of the library further comprise a protease cleavage sequence, and the step (d) comprises cleaving the fusion polypeptide(s) by protease treatment so that the association of the single-domain antibody with the VL is canceled.
[0203] (110) The screening method according to (109), wherein the protease cleavage sequence contained in each fusion polypeptide is located near the boundary between the single-domain antibody and the first association sustaining domain.
[0204] (111) The screening method according to (106), wherein the step (d) comprises allowing the full length of the fusion polypeptide(s) selected in the step (c) or their moieties comprising the single-domain antibodies to be displayed again in vitro.
[0205] (112) The screening method according to (106), wherein the step (d) comprises allowing the full length of the fusion polypeptide(s) selected in the step (c) to be displayed again in vitro and selecting a fusion polypeptide that binds to the antigen or has antigen-binding activity of a predetermined value or higher in a state associated only with the second association sustaining domain.
[0206] (113) A method for screening a library according to (102) for a fusion polypeptide comprising a single-domain antibody whose antigen-binding activity can be inhibited or could lost by its association with particular VH.
[0207] (114) The screening method according to (113), comprising the following steps:
   [0208] (a) allowing the fusion polypeptides of the library to be displayed in vitro;
   [0209] (b) providing an association partner of a second association sustaining domain fused with a particular VH;
   [0210] (c) allowing each of the fusion polypeptides displayed in the step (a) to be associated with the association partner provided in the step (b) and selecting a fusion polypeptide(s) that does not bind to the antigen or has antigen-binding activity of a predetermined value or lower in a state where the single-domain antibody is associated with the VH; and
   [0211] (d) selecting, from the fusion polypeptide(s) thus selected in the step (c), a fusion polypeptide that binds to the antigen or has antigen-binding activity of a predetermined value or higher in a state where the single-domain antibody contained therein is not associated with the VH.
[0212] (115) The screening method according to (114), wherein the association partner provided in the step (b) further comprises a protease cleavage sequence, and the step (d) comprises cleaving the association partner by protease treatment so that the association of the single-domain antibody with the VH is canceled.
[0213] (116) The screening method according to (115), wherein the protease cleavage sequence of the association partner provided in the step (b) is located near the boundary between the particular VH and the second association sustaining domain.
[0214] (117) The screening method according to (114), wherein the fusion polypeptides of the library further comprise a protease cleavage sequence, and the step (d) comprises cleaving the fusion polypeptide(s) by protease treatment so that the association of the single-domain antibody with the VH is canceled.
[0215] (118) The screening method according to (117), wherein the protease cleavage sequence contained in each fusion polypeptide is located near the boundary between the single-domain antibody and the first association sustaining domain.
[0216] (119) The screening method according to (114), wherein the step (d) comprises allowing the full length of the fusion polypeptide(s) selected in the step (c) to be displayed again in vitro or their moieties comprising the single-domain antibodies.
[0217] (120) The screening method according to (114), wherein the step (d) comprises allowing the full length of the fusion polypeptide(s) selected in the step (c) displayed again in vitro and selecting a fusion polypeptide that binds to the antigen or has antigen-binding activity of a predetermined value or higher in a state associated only with the second association sustaining domain.
[0218] (121) A method for screening a library according to (103) for a fusion polypeptide comprising a single-domain antibody whose antigen-binding activity can be inhibited or could lost by its association with particular VHH.
[0219] (122) The screening method according to (121), comprising the following steps:
   [0220] (a) allowing the fusion polypeptides of the library to be displayed in vitro;
   [0221] (b) providing an association partner of a second association sustaining domain fused with a particular VHH;
   [0222] (c) allowing each of the fusion polypeptides displayed in the step (a) to be associated with the association partner provided in the step (b) and selecting a fusion polypeptide(s) that does not bind to the antigen or has antigen-binding activity of a predetermined value or lower in a state where the single-domain antibody is associated with the particular VHH; and
   [0223] (d) selecting, from the fusion polypeptide(s) thus selected in the step (c), a fusion polypeptide that binds to the antigen or has antigen-binding activity of a predetermined value or higher in a state where the single-domain antibody contained therein is not associated with the VHH.
[0224] (123) The screening method according to (122), wherein the association partner provided in the step (b) further comprises a protease cleavage sequence, and the step (d) comprises cleaving the association partner by protease treatment so that the association of the single-domain antibody with the VHH is canceled.
[0225] (124) The screening method according to (123), wherein the protease cleavage sequence of the association partner provided in the step (b) is located near the boundary between the particular VHH and the second association sustaining domain.
[0226] (125) The screening method according to (122), wherein the fusion polypeptides of the library further comprise a protease cleavage sequence, and the step (d) comprises cleaving the fusion polypeptide(s) by protease treatment so that the association of the single-domain antibody with the VHH is canceled.
[0227] (126) The screening method according to (125), wherein the protease cleavage sequence contained in each fusion polypeptide is located near the boundary between the single-domain antibody and the first association sustaining domain.
[0228] (127) The screening method according to (122), wherein the step (d) comprises allowing the full length of the fusion polypeptide(s) selected in the step (c) to be displayed again in vitro or their moieties comprising the single-domain antibodies.
[0229] (128) The screening method according to (122), wherein the step (d) comprises allowing the full length of the fusion polypeptide(s) selected in the step (c) to be displayed again in vitro and selecting a fusion polypeptide that binds to the antigen or has antigen-binding activity of a predetermined value or higher in a state associated only with the second association sustaining domain.
[0230] (129) The screening method according to any of (106) to (112), (114) to (120), and (122) to (128), wherein the step of providing an association partner in the step (b) is the step of allowing the association partner and the fusion polypeptides to be displayed together.
[0231] (130) The library according to any of (99) to (103), wherein the first association sustaining domain comprises an IgG antibody CH1 domain or an antibody light chain constant region.
[0232] (131) The screening method according to any of (106) to (112), (114) to (120), and (122) to (128), wherein the first association sustaining domain comprises an IgG antibody CH1 domain, and the second association sustaining domain comprises an antibody light chain constant region.
[0233] (132) The screening method according to any of (106) to (112), (114) to (120), and (122) to (128), wherein the first association sustaining domain comprises an antibody light chain constant region, and the second association sustaining domain comprises an IgG antibody CH1 domain.
[0234] (133) The screening method according to (105), comprising the following steps:
   [0235] (a) allowing the fusion polypeptides of the library to be displayed in vitro;
   [0236] (b) providing an association partner of a second association sustaining domain fused with a particular VL;
   [0237] (c) selecting a fusion polypeptide(s) comprising a single-domain antibody that binds to the antigen or has antigen-binding activity of a predetermined value or higher; and
   [0238] (d) allowing the fusion polypeptide(s) thus selected in the step (c) to be associated with the association partner provided in the step (b) and selecting a fusion polypeptide that does not bind to the antigen or has antigen-binding activity of a predetermined value or lower in a state where the single-domain antibody is associated with the VL.
[0239] (134) The screening method according to (129), wherein the step (d) comprises allowing the fusion polypeptides selected in the step (c) to be displayed again in vitro.
[0240] (135) The screening method according to (133), wherein the step (c) comprises allowing the fusion polypeptide(s) to be associated only with the second association sustaining domain or confirming the antigen binding of the single-domain antibody contained in the fusion polypeptide associated only with the second association sustaining domain.
[0241] (136) The screening method according to (113), comprising the following steps:
   [0242] (a) allowing the fusion polypeptides of the library to be displayed in vitro;
   [0243] (b) providing an association partner of a second association sustaining domain fused with a particular VH;
   [0244] (c) selecting a fusion polypeptide(s) comprising a single-domain antibody that binds to the antigen or has antigen-binding activity of a predetermined value or higher; and
   [0245] (d) allowing the fusion polypeptide(s) thus selected in the step (c) to be associated with the association partner provided in the step (b) and selecting a fusion polypeptide that does not bind to the antigen or has antigen-binding activity of a predetermined value or lower in a state where the single-domain antibody is associated with the VH.
[0246] (137) The screening method according to (136), wherein the step (d) comprises allowing the fusion polypeptides selected in the step (c) to be displayed again in vitro.
[0247] (138) The screening method according to (136), wherein the step (c) comprises allowing the fusion polypeptide to be associated only with the second association sustaining domain or confirming the antigen binding of the single-domain antibody contained in the fusion polypeptide associated only with the second association sustaining domain.
[0248] (139) The screening method according to (121), comprising the following steps:
   [0249] (a) allowing the fusion polypeptides of the library to be displayed in vitro;
   [0250] (b) providing an association partner of a second association sustaining domain fused with a particular VHH;
   [0251] (c) selecting a fusion polypeptide(s) comprising a single-domain antibody that binds to the antigen or has antigen-binding activity of a predetermined value or higher; and
   [0252] (d) allowing the fusion polypeptide(s) thus selected in the step (c) to be associated with the association partner provided in the step (b) and selecting a fusion polypeptide that does not bind to the antigen or has antigen-binding activity of a predetermined value or lower in a state where the single-domain antibody is associated with the VHH.
[0253] (140) The screening method according to (139), wherein the step (d) comprises allowing the fusion polypeptides selected in the step (c) to be displayed again in vitro.
[0254] (141) The screening method according to (139), wherein the step (c) comprises allowing the fusion polypeptide(s) to be associated only with the second association sustaining domain or confirming the antigen binding of the single-domain antibody contained in the fusion polypeptide associated only with the second association sustaining domain.
[0255] (142) The screening method according to any of (133) to (141), wherein the step of allowing the fusion polypeptide(s) to be associated with the association partner in the step (d) is the step of allowing the association partner and the fusion polypeptides to be displayed together.
[0256] (143) The screening method according to any of (133) to (142), wherein the first association sustaining domain comprises an IgG antibody CH1 domain, and the second association sustaining domain comprises an antibody light chain constant region.
[0257] (144) The screening method according to any of (133) to (142), wherein the first association sustaining domain comprises an antibody light chain constant region, and the second association sustaining domain comprises an IgG antibody CH1 domain.

[0258] Specifically, the present invention may also encompass the following exemplary embodiments.
[0259] (B1) A polypeptide comprising an antigen-binding domain and a carrying moiety, wherein the carrying moiety has an inhibiting domain that inhibits the antigen-binding activity of the antigen-binding domain, and wherein the polypeptide has a protease cleavage sequence comprising one or a plurality of sequences selected from the sequences of SEQ ID NOs: 833 to 852 and SEQ ID NOs: 1062 to 1081 and the sequences described in Table 1.
[0260] (B2) The polypeptide according to (B1), wherein inhibition of antigen-binding activity of the antigen-binding domain by the inhibiting domain in a state where the protease cleavage sequence has been cleaved by a protease is weaker than the inhibition of antigen-binding activity of the antigen-binding domain by the inhibiting domain under a condition where the protease cleavage sequence is uncleaved.
[0261] (B3) The polypeptide according to (B1) or (B2), wherein the antigen-binding domain has a shorter half-life in blood than the carrying moiety.
[0262] (B4) The polypeptide according to any one of (B1) to (B3), wherein the molecular weight of the antigen-binding domain is smaller than that of the carrying moiety.
[0263] (B5) The polypeptide according to any one of (B1) to (B4), wherein the molecular weight of the antigen-binding domain is 60 kDa or less.
[0264] (B6) The polypeptide according to any one of (B1) to (B5), wherein the carrying moiety has FcRn-binding activity, and the antigen-binding domain has no FcRn-binding activity or has weaker FcRn-binding activity than the carrying moiety.
[0265] (B7) The polypeptide according to any one of (B1) to (B6), wherein the antigen-binding domain is capable of being released from the polypeptide, and the antigen-binding domain has higher antigen-binding activity in a state where it is released from the polypeptide than antigen-binding activity in a state where it is not released from the polypeptide.
[0266] (B8) The polypeptide according to any one of (B1) to (B7), wherein the antigen-binding activity of the antigen-binding domain is inhibited by the association of the inhibiting domain of the carrying moiety with the antigen-binding domain.
[0267] (B9) The polypeptide according to (B7), wherein the protease cleavage sequence is cleaved by a protease, so that the antigen-binding domain becomes capable of being released from the polypeptide.
[0268] (B10) The polypeptide according to (B8), wherein the protease cleavage sequence is cleaved by a protease, so that the association of the inhibiting domain of the carrying moiety with the antigen-binding domain is canceled.
[0269] (B11) The polypeptide according to any one of (B1) to (B10), wherein the protease is a target tissue-specific protease.
[0270] (B12) The polypeptide according to (B11), wherein the target tissue is a cancer tissue or an inflammatory tissue, and the protease is a cancer tissue-specific protease or an inflammatory tissue-specific protease.
[0271] (B13) The polypeptide according to any one of (B1) to (B12), wherein the protease is at least one protease selected from matriptase, urokinase (uPA), and metalloproteinase.
[0272] (B14) The polypeptide according to any one of (B1) to (B12), wherein the protease is at least one protease selected from MT-SP1, uPA, MMP-2, MMP-9, ADAMTS5, MMP-7, and MMP-13.
[0273] (B15) The polypeptide according to any one of (B1) to (B14), wherein a first flexible linker is further attached to one end of the protease cleavage sequence.
[0274] (B16) The polypeptide according to (B15), wherein the first flexible linker is a flexible linker consisting of a glycine-serine polymer.
[0275] (B17) The polypeptide according to (B15) or (B16), wherein a second flexible linker is further attached to the other end of the protease cleavage sequence.
[0276] (B18) The polypeptide according to (B17), wherein the second flexible linker is a flexible linker consisting of a glycine-serine polymer.
[0277] (B19) The polypeptide according to any one of (B1) to (B18), wherein the antigen-binding domain comprises a single-domain antibody or is a single-domain antibody, wherein the inhibiting domain of the carrying moiety inhibits the antigen-binding activity of the single-domain antibody.
[0278] (B20) The polypeptide according to (B19), wherein the single-domain antibody is a VHH, a VH having antigen-binding activity by itself, or a VL having antigen-binding activity by itself.
[0279] (B21) The polypeptide according to any one of (B1) to (B20), wherein the antigen-binding domain comprises a single-domain antibody, wherein the inhibiting domain of the carrying moiety is a VHH, an antibody VH, or an antibody VL, and wherein the antigen-binding activity of the single-domain antibody is inhibited by the VHH, the antibody VH, or the antibody VL.
[0280] (B22) The polypeptide according to any one of (B1) to (B21), wherein the antigen-binding domain comprises a single-domain antibody, wherein the inhibiting domain of the carrying moiety is a VHH, an antibody VH, or an antibody VL, and wherein the antigen-binding activity of the single-domain antibody is inhibited by its association with the VHH, the antibody VH, or the antibody VL.
[0281] (B23) The polypeptide according to any one of (B19) to (B22), wherein the single-domain antibody is a VHH or a VH having antigen-binding activity by itself, wherein the inhibiting domain of the carrying moiety is an antibody VL, and wherein the antigen-binding activity of the VHH or the VH having antigen-binding activity by itself is inhibited by its association with the antibody VL.
[0282] (B24) The polypeptide according to any one of (B19) to (B23), wherein the single-domain antibody is a VHH, and wherein the VHH has an amino acid substitution at at least one position selected from amino acids at positions 37, 44, 45, and 47 (all according to Kabat numbering).
[0283] (B25) The polypeptide according to any one of (B19) to (B23), wherein the single-domain antibody is a VHH, and wherein the VHH comprises at least one amino acid selected from amino acids 37V, 44G, 45L, and 47W (all according to Kabat numbering).
[0284] (B26) The polypeptide according to any one of (B19) to (B23), wherein the single-domain antibody is a VHH, and wherein the VHH comprises at least one amino acid substitution selected from amino acid substitutions F37V, Y37V, E44G, Q44G, R45L, H45L, G47W, F47W, L47W, T47W, and S47W (all according to Kabat numbering).
[0285] (B27) The polypeptide according to any one of (B19) to (B23), wherein the single-domain antibody is a VHH, and wherein the VHH has amino acid substitutions at at least one set of positions selected from positions 37/44, positions 37/45, positions 37/47, positions 44/45, positions 44/47, positions 45/47, positions 37/44/45, positions 37/44/47, positions 37/45/47, positions 44/45/47, and positions 37/44/45/47 (all according to Kabat numbering).
[0286] (B28) The polypeptide according to any one of (B19) to (B23), wherein the single-domain antibody is a VHH, and wherein the VHH comprises at least one set of amino acids selected from 37V/44G, 37V/45L, 37V/47W, 44G/45L, 44G/47W, 45L/47W, 37V/44G/45L, 37V/44G/47W, 37V/45L/47W, 44G/45L/47W, and 37V/44G/45L/47W (all according to Kabat numbering).
[0287] (B29) The polypeptide according to any one of (B19) to (B23), wherein the single-domain antibody is a VHH, and wherein the VHH comprises at least one set of amino acid substitutions selected from F37V/R45L, F37V/G47W, R45L/G47W, and F37V/R45L/G47W (all according to Kabat numbering).
[0288] (B30) The polypeptide according to any one of (B19) to (B22), wherein the single-domain antibody is a VL having antigen-binding activity by itself, wherein the inhibiting domain of the carrying moiety is an antibody VH, and wherein the antigen-binding activity of the VL having antigen-binding activity by itself is inhibited by its association with the antibody VH.
[0289] (B31) The polypeptide according to any one of (B1) to (B30), wherein the carrying moiety has an FcRn-binding region.
[0290] (B32) The polypeptide according to any one of (B1) to (B31), wherein the carrying moiety comprises an antibody constant region.
[0291] (B33) The polypeptide according to (B32), wherein the antibody constant region of the carrying moiety and the antigen-binding domain are fused via a linker or without a linker.
[0292] (B34) The polypeptide according to (B32), wherein the carrying moiety comprises an antibody heavy chain constant region, and wherein the antibody heavy chain constant region and the antigen-binding domain are fused via a linker or without a linker.
[0293] (B35) The polypeptide according to (B32), wherein the carrying moiety comprises an antibody light chain constant region, and wherein the antibody light chain constant region and the antigen-binding domain are fused via a linker or without a linker.
[0294] (B36) The polypeptide according to (B34), wherein the N terminus of the antibody heavy chain constant region of the carrying moiety and the C terminus of the antigen-binding domain are fused via a linker or without a linker, and wherein the protease cleavage sequence is located within the sequence of the antigen-binding domain or in the heavy chain antibody constant region on the side closer to the antigen-binding domain beyond the amino acid of position 122 (EU numbering).
[0295] (B37) The polypeptide according to (B35), wherein the N terminus of the antibody light chain constant region of the carrying moiety and the C terminus of the antigen-binding domain are fused via a linker or without a linker, and wherein the protease cleavage sequence is located within the sequence of the antigen-binding domain or in the light chain antibody constant region on the side closer to the antigen-binding domain beyond the amino acid of position 113 (EU numbering) (Kabat numbering position 113).
[0296] (B38) The polypeptide according to any one of (B33) to (B36), wherein the N terminus of the antibody constant region of the carrying moiety and the C terminus of the antigen-binding domain are fused via a linker or without a linker, wherein the antigen-binding domain is a single-domain antibody prepared from a VH, or is a VHH, and wherein the protease cleavage sequence is located within the sequence of the antibody constant region or in the single-domain antibody of the antigen-binding domain on the side closer to the antibody constant region beyond the amino acid of position 109 (Kabat numbering).
[0297] (B39) The polypeptide according to (B33), wherein the N terminus of the antibody constant region of the carrying moiety and the C terminus of the antigen-binding domain are fused via a linker or without a linker, and wherein the protease cleavage sequence is located near the boundary between the antigen-binding domain and the antibody constant region.
[0298] (B40) The polypeptide according to (B34), wherein the N terminus of the antibody heavy chain constant region of the carrying moiety and the C terminus of the antigen-binding domain are fused via a linker or without a linker, and wherein the protease cleavage sequence is located near the boundary between the antigen-binding domain and the antibody heavy chain constant region.
[0299] (B41) The polypeptide according to (B35), wherein the N terminus of the antibody light chain constant region of the carrying moiety and the C terminus of the antigen-binding domain are fused via a linker or without a linker, and wherein the protease cleavage sequence is located near the boundary between the antigen-binding domain and the antibody light chain constant region.
[0300] (B42) The polypeptide according to (B40), wherein the antigen-binding domain is a single-domain antibody prepared from a VH, or is a VHH, and wherein the protease cleavage sequence is located between the amino acid of position 109 (Kabat numbering) of the single-domain antibody of the antigen-binding domain and the amino acid of position 122 (EU numbering) of the antibody heavy chain constant region.
[0301] (B43) The polypeptide according to (B41), wherein the antigen-binding domain is a single-domain antibody prepared from a VH, or is a VHH, and wherein the protease cleavage sequence is located between the amino acid of position 109 (Kabat numbering) of the single-domain antibody of the antigen-binding domain and the amino acid of position 113 (EU numbering) (Kabat numbering position 113) of the antibody light chain constant region.
[0302] (B44) The polypeptide according to (B40), wherein the antigen-binding domain is a single-domain antibody prepared from a VL, and wherein the protease cleavage sequence is located between the amino acid of position 104 (Kabat numbering) of the single-domain antibody of the antigen-binding domain and the amino acid of position 122 (EU numbering) of the antibody heavy chain constant region.
[0303] (B45) The polypeptide according to (B41), wherein the antigen-binding domain is a single-domain antibody prepared from a VL, and wherein the protease cleavage sequence is located between the amino acid of position 109 (Kabat numbering) of the single-domain antibody of the antigen-binding domain and the amino acid of position 113 (EU numbering) (Kabat numbering position 113) of the antibody light chain constant region.
[0304] (B46) The polypeptide according to any one of (B32) to (B45), wherein the antibody constant region of the polypeptide is an IgG antibody constant region.
[0305] (B47) The polypeptide according to any one of (B1) to (B46), wherein the polypeptide is an IgG antibody-like molecule.
[0306] (B48) The polypeptide according to any one of (B1) to (B47), wherein when the antigen-binding domain is assayed in an unreleased state by using a bio-layer interferometry (BLI) (Octet), the binding of the antigen-binding domain to the antigen is not seen.
[0307] (B49) The polypeptide according to any one of (B1) to (B48), wherein a second antigen-binding domain is further linked to the antigen-binding domain.
[0308] (B50) The polypeptide according to (B49), wherein the second antigen-binding domain has antigen-binding specificity different from that of the antigen-binding domain.
[0309] (B51) The polypeptide according to (B49) or (B50), wherein the second antigen-binding domain comprises a second single-domain antibody.
[0310] (B52) The polypeptide according to (B51), wherein the antigen-binding domain is a single-domain antibody, wherein the second antigen-binding domain is a second single-domain antibody, wherein the antigen-binding domain and the second antigen-binding domain are capable of being released from the polypeptide, and wherein the single-domain antibody and the second single-domain antibody form a bispecific antigen-binding molecule in a state where the antigen-binding domain and the second antigen-binding domain are released.
[0311] (B53) The polypeptide according to any one of (B49) to (B52), wherein the second antigen-binding domain is directed to HER2 or GPC3 as a target antigen.
[0312] (B54) The polypeptide according to any one of (B1) to (B53), wherein the polypeptide further has an additional antigen-binding domain different from the antigen-binding domain, and wherein the antigen-binding activity of the additional antigen-binding domain is also inhibited by its linkage to the carrying moiety of the polypeptide.
[0313] (B55) The polypeptide according to (B54), wherein the additional antigen-binding domain and the antigen-binding domain have different antigen-binding specificities.
[0314] (B56) The polypeptide according to any one of (B1) to (B55), wherein the antigen-binding domain is an antigen-binding domain directed to Plexin A1, IL-6R, or CD3 as a target antigen.
[0315] (B57) A pharmaceutical composition comprising the polypeptide of any one of (B1) to (B56).
[0316] (B58) A method for producing the polypeptide of any one of (B1) to (B56).
[0317] (B59) The production method according to (B58), comprising the steps of:
   [0318] (a) obtaining a single-domain antibody binding to a target antigen;
   [0319] (b) linking the single-domain antibody obtained in step (a) to a carrying moiety such that the antigen-binding activity of the single-domain antibody is inhibited by an inhibiting domain of the carrying moiety, to form a polypeptide precursor; and
   [0320] (c) introducing a protease cleavage sequence into the polypeptide precursor.
[0321] (B60) The production method according to (B58), comprising the steps of:
   [0322] (a) obtaining a single-domain antibody binding to a target antigen;
   [0323] (b) linking the single-domain antibody obtained in step (a) to a carrying moiety such that the antigen-binding activity of the single-domain antibody is inhibited by an inhibiting domain of the carrying moiety, to form a polypeptide precursor; and
   [0324] (c) introducing a protease cleavage sequence to near the boundary between the single-domain antibody and the carrying moiety, wherein the protease cleavage sequence comprises one or a plurality of sequences selected from the sequences of SEQ ID NOs: 833 to 852 and SEQ ID NOs: 1062 to 1081 and the sequences described in Table 1.
[0325] (B61) The production method according to (B58), comprising the steps of:
   [0326] (a) obtaining a single-domain antibody binding to a target antigen; and
   [0327] (b) linking the single-domain antibody obtained in step (a) to a carrying moiety via a protease cleavage sequence such that the antigen-binding activity of the single-domain antibody is inhibited by an inhibiting domain of the carrying moiety, to form a polypeptide, wherein the protease cleavage sequence comprises one or a plurality of sequences selected from the sequences of SEQ ID NOs: 833 to 852 and SEQ ID NOs: 1062 to 1081 and the sequences described in Table 1.
[0328] (B62) The production method according to any one of (B59) to (B61), further comprising the step of:
   [0329] (d) confirming that the binding activity of the single-domain antibody harboring the polypeptide or the polypeptide precursor against the target antigen is weakened or lost.
[0330] (B63) The production method according to any one of (B59) to (B62), further comprising the step of:
   [0331] (e) releasing the single-domain antibody by cleaving the protease cleavage sequence with a protease and confirming that the released single-domain antibody binds to the antigen.
[0332] (B64) The production method according to (B58), wherein the polypeptide is an IgG antibody-like molecule.
[0333] (B65) The production method according to (B64), comprising the steps of:
   [0334] (a) obtaining a single-domain antibody binding to a target antigen;
   [0335] (b) allowing the single-domain antibody obtained in step (a) to be associated with a VL as a substitute for a VH of an IgG antibody or allowing the single-domain antibody to be associated with a VH as a substitute for a VL of an IgG antibody, such that the antigen-binding activity of the single-domain antibody is inhibited, to form an IgG antibody-like molecule precursor harboring the single-domain antibody; and
   [0336] (c) introducing a protease cleavage sequence into the IgG antibody-like molecule precursor harboring the single-domain antibody, wherein the protease cleavage sequence comprises one or a plurality of sequences selected from the sequences of SEQ ID NOs: 833 to 852 and SEQ ID NOs: 1062 to 1081 and the sequences described in Table 1.
[0337] (B66) The production method according to (B64), comprising the steps of:
   [0338] (a) obtaining a single-domain antibody binding to a target antigen;
   [0339] (b) allowing the single-domain antibody obtained in step (a) to be associated with a VL as a substitute for a VH of an IgG antibody or allowing the single-domain antibody to be associated with a VH as a substitute for a VL of an IgG antibody, such that the antigen-binding activity of the single-domain antibody is inhibited, to form an IgG antibody-like molecule precursor harboring the single-domain antibody; and
   [0340] (c) introducing a protease cleavage sequence to near the boundary between the single-domain antibody and an antibody constant region in the IgG antibody-like molecule precursor, wherein the protease cleavage sequence comprises one or a plurality of sequences selected from the sequences of SEQ ID NOs: 833 to 852 and SEQ ID NOs: 1062 to 1081 and the sequences described in Table 1.
[0341] (B67) The production method according to (B64), comprising the steps of:
   [0342] (a) obtaining a single-domain antibody binding to a target antigen; and
   [0343] (b) linking the single-domain antibody obtained in step (a) as a substitute for an IgG antibody VH or VL to an IgG antibody heavy chain constant region or light chain constant region via a protease cleavage sequence such that the antigen-binding activity of the single-domain antibody is inhibited, to form an IgG antibody-like molecule harboring the single-domain antibody, wherein the protease cleavage sequence comprises one or a plurality of sequences selected from the sequences of SEQ ID NOs: 833 to 852 and SEQ ID NOs: 1062 to 1081 and the sequences described in Table 1.
[0344] (B68) The production method according to any one of (B65) to (B67), further comprising the step of:
   [0345] (d) confirming that the binding activity of the single-domain antibody introduced into the IgG antibody-like molecule or into the IgG antibody-like molecule precursor against the target antigen is weakened or lost.
[0346] (B69) The production method according to any one of (B65) to (B68), further comprising the step of:
   [0347] (e) releasing the single-domain antibody by cleaving the protease cleavage sequence with a protease and confirming that the released single-domain antibody binds to the target antigen.
[0348] (B70) The production method according to (B64), comprising the steps of:
   [0349] (a) substituting an amino acid residue in a single-domain antibody that is involved in the association with an antibody VH, or substituting an amino acid residue in a single-domain antibody that is involved in the association with an antibody VL, to prepare a variant single-domain antibody retaining the binding activity of the single-domain antibody against the target antigen;
   [0350] (b) allowing the variant single-domain antibody prepared in step (a) to be associated with an antibody VH or by allowing the variant single-domain antibody to be associated with an antibody VL, such that the antigen-binding activity of the variant single-domain antibody is inhibited to form an IgG antibody-like molecule precursor harboring the variant single-domain antibody; and
   [0351] (c) introducing a protease cleavage sequence into the IgG antibody-like molecule precursor harboring the variant single-domain antibody, wherein the protease cleavage sequence comprises one or a plurality of sequences selected from the sequences of SEQ ID NOs: 833 to 852 and SEQ ID NOs: 1062 to 1081 and the sequences described in Table 1.
[0352] (B71) The production method according to (B64), comprising the steps of:
   [0353] (a) substituting an amino acid residue in a single-domain antibody that is involved in the association with an antibody VH or substituting an amino acid residue in a single-domain antibody that is involved in the association with an antibody VL, to prepare a variant single-domain antibody retaining the binding activity of the single-domain antibody against the target antigen;
   [0354] (b) allowing the variant single-domain antibody prepared in step (a) to be associated with an antibody VH or allowing the variant single-domain antibody to be associated with an antibody VL, such that the antigen-binding activity of the variant single-domain antibody is inhibited, to form an IgG antibody-like molecule precursor harboring the variant single-domain antibody; and
   [0355] (c) introducing a protease cleavage sequence to near the boundary between the variant single-domain antibody and a constant region in the IgG antibody-like molecule precursor, wherein the protease cleavage sequence comprises one or a plurality of sequences selected from the sequences of SEQ ID NOs: 833 to 852 and SEQ ID NOs: 1062 to 1081 and the sequences described in Table 1.
[0356] (B72) The production method according to (B64), comprising the steps of:
   [0357] (a) substituting an amino acid residue in a single-domain antibody that is involved in the association with an antibody VH or substituting an amino acid residue in a single-domain antibody that is involved in the association with an antibody VL, to prepare a variant single-domain antibody retaining the binding activity of the single-domain antibody against the target antigen; and
   [0358] (b) linking the variant single-domain antibody prepared in step (a) to an IgG antibody heavy chain constant region via a protease cleavage sequence or linking the variant single-domain antibody to an IgG antibody light chain constant region via a protease cleavage sequence, such that the antigen-binding activity of the variant single-domain antibody is inhibited, to form an IgG antibody-like molecule harboring the variant single-domain antibody, wherein the protease cleavage sequence comprises one or a plurality of sequences selected from the sequences of SEQ ID NOs: 833 to 852 and SEQ ID NOs: 1062 to 1081 and the sequences described in Table 1.
[0359] (B73) The production method according to any one of (B70) to (B72), further comprising the step of:
   [0360] (d) confirming that the binding activity of the variant single-domain antibody introduced into the IgG antibody-like molecule or into the IgG antibody-like molecule precursor against the target antigen is weakened or lost.
[0361] (B74) The production method according to any one of (B70) to (B73), further comprising the step of:
   [0362] (e) releasing the variant single-domain antibody by cleaving the protease cleavage sequence with a protease and confirming that the released variant single-domain antibody binds to the target antigen.
[0363] (B75) A polynucleotide encoding the polypeptide of any one of (B1) to (B56).
[0364] (B76) A vector comprising the polynucleotide of (B75).
[0365] (B77) A host cell comprising the polynucleotide of (B75) or the vector of (B76).
[0366] (B78) A method for producing the polypeptide of any one of (B1) to (B56), comprising the step of culturing the host cell of (B77).

### BRIEF DESCRIPTION OF DRAWINGS

[0367] FIG. 1 is a diagram showing the concept of Probody technology. The Probody is an antibody molecule whose antigen-binding activity is inhibited by linkage of an antibody to a peptide masking the antigen-binding site of the antibody via a linker that is cleaved by protease expressed at a lesion site.

[0368] FIG. 2 is a diagram showing a cause of side effects that might be exhibited by Probody. Activated Probody accumulated in blood might exhibit side effects by binding to an antigen expressed in a normal tissue.

[0369] FIG. 3 is a diagram showing a cause of side effects that might be exhibited by Probody. The Probody is in equilibrium between a state where the masking peptide linked via the linker is bound with the antigen-binding site and a state where the masking peptide is dissociated. A molecule in the dissociated state can bind to the antigen.

[0370] FIG. 4 is a diagram showing a cause of side effects that might be exhibited by Probody. An anti-drug antibody against the masking peptide (anti-masking peptide antibody) might bind to the masking peptide of Probody before activation and thereby activate the Probody without protease cleavage.

[0371] FIG. 5 is a diagram showing the concept of a polypeptide comprising an antigen-binding domain and a carrying moiety. (A) The polypeptide with the antigen-binding domain linked to the carrying moiety has a long half-life and does not bind to the antigen. (B) The antigen-binding domain is released by, for example, cleavage at a cleavage site to bind to the antigen, and the antigen-binding domain thus released has a short half-life.

[0372] FIG. 6 is a diagram showing one embodiment of a method for producing the polypeptide of the present invention. In the present embodiment, the polypeptide of interest is an IgG antibody-like molecule. (A) A single-domain antibody binding to the target antigen is obtained. (B) The single-domain antibody is allowed to be associated with a VL as a substitute for VH of an IgG antibody such that the antigen-binding activity of the single-domain antibody is inhibited. (C) A protease cleavage sequence is introduced into an IgG antibody-like molecule precursor harboring the single-domain antibody.

[0373] FIG. 7 is a diagram showing one embodiment of the polypeptide of the present invention. In the present embodiment, the polypeptide is an IgG antibody-like molecule, and antigen-binding domains are respectively established at moieties corresponding to two variable regions of the IgG antibody. The two antigen-binding domains may have the same antigen-binding specificity or may differ in antigen-binding specificity.

[0374] FIG. 8 is a diagram showing an embodiment in which a second antigen-binding domain is further linked to the antigen-binding domain of the present invention. In this embodiment, the antigen-binding domain and the second antigen-binding domain form a bispecific antigen-binding molecule after release. FIG. 8(A) is a diagram showing the polypeptide in an unreleased state. The antigen-binding activity of the antigen-binding domain is inhibited. FIG. 8(B) is a diagram showing the release of the bispecific antigen-binding molecule formed by the antigen-binding domain and the second antigen-binding domain. FIG. 8(C) is a diagram showing a bispecific antigen-binding molecule against, for example, a T cell surface antigen and a cancer cell surface antigen, as an example of the bispecific antigen-binding molecule after the release.

[0375] FIG. 9A is a diagram showing one example of a method for screening for a fusion polypeptide comprising a single-domain antibody whose antigen-binding activity can be inhibited or could lost by its association with a particular inhibiting domain, from a library comprising a plurality of fusion polypeptides of single-domain antibodies each linked to a first association sustaining domain. FIG. 9A(1) is a diagram showing the library comprising a plurality of fusion polypeptides of single-domain antibodies each linked to a first association sustaining domain. FIG. 9A(2) is a diagram showing that the antigen-binding activity of each single-domain antibody is confirmed in a state where the fusion polypeptide is associated with an association partner. A fusion polypeptide comprising a single-domain antibody that does not bind to the target antigen or has antigen-binding activity of a predetermined value or lower in this state of association is selected. FIG. 9A(3) is a diagram showing that the association of the single-domain antibody in the fusion polypeptide selected in (2) with the inhibiting domain in the association partner is canceled, and the antigen-binding activity of the single-domain antibody is confirmed. A fusion polypeptide comprising a single-domain antibody that binds to the target antigen or has antigen-binding activity of a predetermined value or higher in this state of non-association is selected. FIG. 9A(2′) is a diagram showing that the antigen-binding activity of the single-domain antibody in each fusion polypeptide is confirmed. A fusion polypeptide comprising a single-domain antibody that binds to the target antigen or has antigen-binding activity of a predetermined value or higher in this state of the fusion polypeptide existing alone is selected. FIG. 9A(3′) is a diagram showing that the antigen-binding activity of the single-domain antibody is confirmed in a state where the fusion polypeptide selected in (2′) is associated with an association partner. A fusion polypeptide comprising a single-domain antibody that does not bind to the target antigen or has antigen-binding activity of a predetermined value or lower in this state of association is selected.

[0376] FIG. 9B is a diagram showing one more specific example of the method for screening for a fusion polypeptide comprising a single-domain antibody whose antigen-binding activity can be inhibited or could lost by its association with a particular inhibiting domain, from a library comprising a plurality of fusion polypeptides of single-domain antibodies each linked to a first association sustaining domain. (1) The fusion polypeptides each comprising a single-domain antibody and a first association sustaining domain and an association partner harboring a protease cleavage sequence between an inhibiting domain and a second association sustaining domain are displayed together to form a Fab-like structure; (2) from among the Fab-like structures thus displayed, a structure that does not bind to the antigen or has antigen-binding activity of a predetermined value or lower is selected; and (3) the association partner is cleaved by protease, and a fragment comprising a single-domain antibody that binds to the antigen or has antigen-binding activity of a predetermined value or higher is selected.

[0377] FIG. 9C is a diagram showing another more specific example of the method for screening for a fusion polypeptide comprising a single-domain antibody whose antigen-binding activity can be inhibited or could lost by its association with a particular inhibiting domain, from a library comprising a plurality of fusion polypeptides of single-domain antibodies each linked to a first association sustaining domain. (1) The fusion polypeptides each harboring a protease cleavage sequence between a single-domain antibody and a first association sustaining domain and an association partner of an inhibiting domain linked to a second association sustaining domain are displayed together to form a Fab-like structure; (2) from among the Fab-like structures thus displayed, a structure that does not bind to the antigen or has antigen-binding activity of a predetermined value or lower is selected; and (3) the fusion polypeptide is cleaved by protease, and a fragment comprising a single-domain antibody that binds to the antigen or has antigen-binding activity of a predetermined value or higher is selected.

[0378] FIG. 9D is a diagram showing an alternative example of the method for screening for a fusion polypeptide comprising a single-domain antibody whose antigen-binding activity can be inhibited or could lost by its association with a particular inhibiting domain, from a library comprising a plurality of fusion polypeptides of single-domain antibodies each linked to a first association sustaining domain. (1) The fusion polypeptides each comprising a single-domain antibody and a first association sustaining domain and an association partner of an inhibiting domain linked to a second association sustaining domain are displayed together to form a Fab-like structure, and from among the Fab-like structures thus displayed, a structure that does not bind to the antigen or has antigen-binding activity of a predetermined value or lower is selected; and (2) moieties comprising the single-domain antibodies in the Fab-like structures thus selected in (1) are displayed again so as not to express the inhibiting domain at the same time therewith, and a fragment that binds to the antigen or has antigen-binding activity of a predetermined value or higher is selected. Each of FIGS. 9D(2′) and 9D(2″) is a diagram showing an alternative embodiment in which the moieties comprising the single-domain antibodies in (2) are displayed again so as not to express the inhibiting domain together therewith. The order of (1) and (2), (2′) or (2″) may be (2), (2′) or (2″) preceding (1). Specifically, the moieties comprising the single-domain antibodies are displayed so as not to express the inhibiting domain together therewith, and a fragment having antigen-binding activity of a predetermined value or higher is selected. Next, fusion polypeptides each comprising a single-domain antibody comprising the fragment having predetermined or larger binding and a first association sustaining domain, and an association partner of an inhibiting domain linked to a second association sustaining domain are displayed together to form a Fab-like structure, and from among the Fab-like structures thus displayed, a structure that does not bind to the antigen or has antigen-binding activity of a predetermined value or lower is selected.

[0379] FIG. 10 is a diagram showing results of evaluating the human IL-6R binding of antibody-like molecules prepared by allowing various light chains to be associated with IL6R90-G1m containing anti-human IL-6R VHH (IL6R90) fused with a human IgG1 constant region (CH1-hinge-CH2-CH3). The time of onset of the action of the antibody-like molecules on antigen-immobilized sensors is a starting point on the abscissa.

[0380] FIG. 11(A) is a diagram showing antibody-like molecule model prepared by inserting a protease cleavage sequence near the boundary between VHH and the constant region in IL6R90-G1m. FIG. 11(B) is a diagram showing the name of each prepared antibody heavy chain, the insertion site of the amino acid sequence, and the inserted amino acid sequence. The insertion site is indicated by [insert].

[0381] FIG. 12-1 is a diagram showing results of evaluating the degree of cleavage by reducing SDS-PAGE after protease (MT-SP1) treatment of IL6R90-G1m or antibody-like molecules prepared by inserting a protease cleavage sequence near the boundary between VHH and the constant region in IL6R90-G1m. Of two new bands resulting from the protease treatment, the band appearing at 25 kDa or smaller is a band derived from the VHH, and the band appearing at a position of 25 to 50 kDa is a band derived from the constant region.

[0382] FIG. 12-2 is a diagram continued from FIG. 12-1.

[0383] FIG. 13 is a diagram showing results of evaluating the human IL-6R binding of IL6R90-G1m or antibody-like molecules prepared by inserting a protease cleavage sequence near the boundary between VHH and the constant region in IL6R90-G1m, or these samples after protease (MT-SP1) treatment. Protease− depicts sensorgrams of evaluating the binding of the protease-untreated antibody-like molecules to the antigen, and Protease+ depicts sensorgrams of evaluating the binding of the protease-treated antibody-like molecules to the antigen. 30 seconds before onset of the action of the antibody-like molecules on antigen-immobilized sensors are a starting point on the abscissa.

[0384] FIG. 14 is a diagram showing results of evaluating the human IL-6R binding of antibody-like molecules prepared by allowing various light chains to be associated with 20A11-G1m containing anti-human IL-6R VHH (20A11) fused with a human IgG1 constant region (CH1-hinge-CH2-CH3). 30 seconds before the time of onset of the action of the antibody-like molecules on antigen-immobilized sensors are a starting point on the abscissa.

[0385] FIG. 15 is a diagram showing results of evaluating the human IL-6R binding of 20A11-G1m or antibody-like molecules prepared by introducing mutations to amino acids present at the interface between 20A11 and VL and allowing various light chains to be associated with 20A11hu-G1m containing the thus-prepared 20A11hu fused with a human IgG1 constant region (CH1-hinge-CH2-CH3). 60 seconds before the time of onset of the action of the antibody-like molecules on antigen-immobilized sensors are a starting point on the abscissa.

[0386] FIG. 16 is a diagram showing results of evaluating the degree of cleavage by reducing SDS-PAGE after protease (MT-SP1) treatment of 20A11-G1m or 4 types of antibody-like molecules prepared by inserting a protease cleavage sequence near the boundary between 20A11hu and the constant region in 20A11hu-G1m. Of two new bands resulting from the protease treatment, the band appearing at 25 kDa or smaller is a band derived from the VHH, and the band appearing at a position of 25 to 50 kDa is a band derived from the constant region.

[0387] FIG. 17 is a diagram showing results of evaluating the human IL-6R binding of 20A11-G1m or antibody-like molecules prepared by inserting a protease cleavage sequence near the boundary between VHH and the constant region in 20A11hu-G1m, or these samples after protease (MT-SP1) treatment. Protease− depicts sensorgrams of evaluating the binding of the protease-untreated antibody-like molecules to the antigen, and Protease+ depicts sensorgrams of evaluating the binding of the protease-treated antibody-like molecules to the antigen. 60 seconds before onset of the action of the antibodies on antigen-immobilized sensors are a starting point on the abscissa. The sample with the term “not tested” represents that the sample was not assayed.

[0388] FIG. 18 is a diagram showing results of evaluating the degree of cleavage by subjecting to electrophoresis in reducing SDS-PAGE and detection with CBB after protease (MT-SP1) treatment of antibody-like molecules that had anti-human CD3 VHH in their heavy chain variable regions and were prepared by inserting a protease cleavage sequence near the boundary between the VHH and the heavy chain constant region. Of two new bands resulting from the protease treatment, the band appearing around 10 to 15 kDa is a band derived from the VHH, and the band appearing around 37 kDa is a band derived from the heavy chain constant region.

[0389] FIG. 19 is a diagram showing results of evaluating the human CD3ed-Fc binding of samples after protease (MT-SP1) treatment of antibody-like molecules that had anti-human CD3 VHH in their heavy chain variable regions and were prepared by inserting a protease cleavage sequence near the boundary between the VHH and the heavy chain constant region. Protease− depicts sensorgrams of evaluating the binding of the protease-untreated antibody-like molecules to the antigen, and Protease+ depicts sensorgrams of evaluating the binding of the protease-treated antibody-like molecules to the antigen. 30 seconds before onset of the action of the antibody-like molecules on antigen-immobilized sensors are a starting point on the abscissa. The binding is shown when a response before antigen binding was defined as 0 and a response before action of the antibodies was defined as 100. The time starting at 30 seconds before action of the antibodies is shown.

[0390] FIG. 20 is a diagram showing results of evaluating the degree of cleavage by subjecting to electrophoresis in reducing SDS-PAGE and detection with CBB after protease (MT-SP1) treatment of a molecule having IL6R90-G1m as a heavy chain and Vk1-39-k0MT as a light chain, or antibody-like molecules prepared by inserting a protease cleavage sequence near the boundary between the light chain variable region and the light chain constant region of the molecule having IL6R90-G1m as a heavy chain and Vk1-39-k0MT as a light chain. Two bands derived from the light chain resulted from the protease treatment, and the light chain was cleaved by protease.

[0391] FIG. 21 is a diagram showing results of evaluating the human IL-6R binding of samples after protease (MT-SP1) treatment of a molecule having IL6R90-G1m as a heavy chain and Vk1-39-k0MT as a light chain, or antibody-like molecules prepared by inserting a protease cleavage sequence near the boundary between the light chain variable region and the light chain constant region of the molecule having IL6R90-G1m as a heavy chain and Vk1-39-k0MT as a light chain. Protease− depicts sensorgrams of evaluating the binding of the protease-untreated antibody-like molecules to the antigen, and Protease+ depicts sensorgrams of evaluating the binding of the protease-treated antibody-like molecules to the antigen. An antibody (MRA) confirmed to bind to IL-6R was used as a positive control. The time of onset of the action of the antibody-like molecules on antigen-immobilized sensors is a starting point on the abscissa.

[0392] FIG. 22 is a diagram showing SDS-PAGE results of evaluating the protease cleavage of IgG antibody-like molecules with incorporated VHH binding to human Plexin A1. Protease(+) lane depicts samples treated by protease cleavage, and protease(−) lane depicts negative control samples without the protease cleavage treatment.

[0393] FIG. 23 is a diagram showing Octet sensorgrams of evaluating the human Plexin A1 binding of VHH released by protease cleavage from IgG antibody-like molecules with incorporated VHH binding to human Plexin A1. Protease+ depicts samples treated by protease cleavage, and protease− depicts samples without the protease cleavage treatment. The concentrations of the IgG antibody-like molecules used are described on the left side of the diagram.

[0394] FIG. 24 is a diagram showing SDS-PAGE results of evaluating the protease cleavage of polypeptides containing bispecific VHH-VHH.

[0395] FIG. 25 is a diagram showing luciferase activity before and after protease cleavage. The broken line depicts samples without protease treatment, and the solid line depicts samples with protease treatment.

[0396] FIG. 26 is a diagram showing luciferase activity before and after protease cleavage. The broken line depicts samples without protease treatment, and the solid line depicts samples with protease treatment.

[0397] FIG. 27 is a diagram showing the SDS-PAGE evaluation of the protease cleavage of an IgG antibody-like molecule containing anti-human IL-6R VHH.

[0398] FIG. 28 is a diagram showing the evaluation of the protease cleavage of IgG antibody-like molecules harboring a protease cleavage sequence in their light chains.

[0399] FIG. 29 is a diagram showing the evaluation of the degree of activation based on the presence or absence of the protease treatment of IgG-like antibody molecules harboring a protease cleavage sequence in their light chains.

[0400] FIG. 30A is a diagram showing the evaluation of the protease cleavage of IgG antibody-like molecules harboring a protease cleavage sequence in their heavy chains.

[0401] FIG. 30B is a diagram showing the evaluation of the protease cleavage of IgG antibody-like molecules harboring a protease cleavage sequence in their heavy chains. The cleavage by protease was carried out using an assay buffer (MMP Activity Assay Kit (Fluorometric—Green) (ab112146), Component C: Assay Buffer).

[0402] FIG. 31 is a diagram showing the evaluation of the cleavage efficiency in vivo when an antibody molecule into which a protease cleavage sequence has been inserted was administered to mice.

### DESCRIPTION OF EMBODIMENTS

[0403] The polypeptide according to the present invention usually refers to a peptide having a length on the order of 4 amino acids or longer, and a protein. Also, the polypeptide according to the present invention is usually a polypeptide consisting of an artificially designed sequence, but is not particularly limited thereto. For example, an organism-derived polypeptide may be used. Alternatively, the polypeptide according to the present invention may be any of a natural polypeptide, a synthetic polypeptide, a recombinant polypeptide, and the like. Furthermore, fragments of these polypeptides are also included in the polypeptide of the present invention.

[0404] In the present specification, each amino acid is indicated by one-letter code or three-letter code, or both, as represented by, for example, Ala/A, Leu/L, Arg/R, Lys/K, Asn/N, Met/M, Asp/D, Phe/F, Cys/C, Pro/P, Gln/Q, Ser/S, Glu/E, Thr/T, Gly/G, Trp/W, His/H, Tyr/Y, Ile/I, or Val/V. For expressing an amino acid located at a particular position, an expression using a number representing the particular position in combination with the one-letter code or the three-letter code of the amino acid can be appropriately used. For example, an amino acid 37V, which is an amino acid contained in a single-domain antibody, represents Val located at position 37 defined by the Kabat numbering.

[0405] For the alteration of an amino acid in the amino acid sequence of a polypeptide, a method known in the art such as site-directed mutagenesis (Kunkel et al. (Proc. Natl. Acad. Sci. USA (1985) 82, 488-492)) or overlap extension PCR can be appropriately adopted. A plurality of methods known in the art can also be adopted as alteration methods for substituting an amino acid by an amino acid other than a natural amino acid (Annu. Rev. Biophys. Biomol. Struct. (2006) 35, 225-249; and Proc. Natl. Acad. Sci. U.S.A. (2003) 100 (11), 6353-6357). For example, a tRNA-containing cell-free translation system (Clover Direct (Protein Express)) having a non-natural amino acid bound with amber suppressor tRNA complementary to UAG codon (amber codon), which is a stop codon, is also preferably used. In the present specification, examples of the alteration include, but are not limited to, substitution.

[0406] In the present specification, the term “and/or” used to represent amino acid alteration sites is meant to include every combination appropriately represented by “and” and “or”. Specifically, for example, the phrase “amino acids at positions 37, 45, and/or 47 are substituted” includes the following variations of amino acid alteration:
[0407] (a) position 37, (b) position 45, (c) position 47, (d) positions 37 and 45, (e) positions 37 and 47, (f) positions 45 and 47, and (g) positions 37, 45 and 47.

[0408] In the present specification, expression in which the one-letter codes or three-letter-codes of amino acids before and after alteration are used previous and next to a number representing a particular position can be appropriately used for representing amino acid alteration. For example, an alteration F37V or Phe37Val used for substituting an amino acid contained in an antibody variable region or a single-domain antibody represents the substitution of Phe at position 37 defined by the Kabat numbering by Val. Specifically, the number represents an amino acid position defined by the Kabat numbering; the one-letter code or three-letter code of the amino acid previous to the number represents the amino acid before the substitution; and the one-letter code or three-letter code of the amino acid next to the number represents the amino acid after the substitution. Likewise, an alteration P238A or Pro238Ala used for substituting an amino acid in a Fc region contained in an antibody constant region represents the substitution of Pro at position 238 defined by the EU numbering by Ala. Specifically, the number represents an amino acid position defined by the EU numbering; the one-letter code or three-letter code of the amino acid previous to the number represents the amino acid before the substitution; and the one-letter code or three-letter code of the amino acid next to the number represents the amino acid after the substitution.

[0409] In the present specification, the term “antibody” is used in the broadest sense and encompasses various antibody structures including, but are not limited to, a monoclonal antibody, a polyclonal antibody, a multispecific antibody (e.g., a bispecific antibody), a single-domain antibody, and an antibody fragment as long as the antibody exhibits the desired antigen-binding activity.

[0410] The “antibody fragment” refers to a molecule other than an intact antibody that comprises a portion of an intact antibody that binds the antigen to which the intact antibody binds. Examples of the antibody fragments include but are not limited to, Fv, Fab, Fab′, Fab′-SH, F(ab′)2, diabodies, linear antibodies, single-chain antibody molecules (e.g., scFv), and multispecific antibodies formed from antibody fragments.

[0411] The terms “full-length antibody”, “intact antibody”, and “whole antibody” are used herein interchangeably to refer to an antibody having a structure substantially similar to a native antibody structure or having heavy chains that contain a Fc region as defined herein.

[0412] The term “variable region” or “variable domain” refers to a region or a domain of an antibody heavy chain or light chain involved in the binding of the antibody to its antigen. Usually, antibody heavy chain and light chain variable domains (VH and VL, respectively) are structurally similar and each contain 4 conserved framework regions (FRs) and 3 complementarity determining regions (CDRs) (see e.g., Kindt et al., Kuby Immunology, 6th ed., W. H. Freeman and Co., page 91 (2007)). One VH or VL domain may suffice for conferring antigen-binding specificity.

[0413] The term “complementarity determining region” or “CDR” used in the present specification is hypervariable in the sequence, and/or forms a structurally determined loop (“hypervariable loop”), and/or refers to antigen contact residues (“antigen contacts”) or each region of an antibody variable domain. Usually, an antibody contains 6 CDRs: three in VH (H1, H2, and H3), and three in VL (L1, L2, and L3). In the present specification, exemplary CDRs include the following:
[0414] (a) hypervariable loops occurring at amino acid residues 26 to 32 (L1), 50 to 52 (L2), 91 to 96 (L3), 26 to 32 (H1), 53 to 55 (H2), and 96 to 101 (H3) (Chothia and Lesk, J. Mol. Biol. 196: 901-917 (1987));
[0415] (b) CDRs occurring at amino acid residues 24 to 34 (L1), 50 to 56 (L2), 89 to 97 (L3), 31 to 35b (H1), 50 to 65 (H2), and 95 to 102 (H3) (Kabat et al., Sequences of Proteins of Immunological Interest, 5th Ed. Public Health Service, National Institutes of Health, Bethesda, Md. (1991));
[0416] (c) antigen contacts occurring at amino acid residues 27c to 36 (L1), 46 to 55 (L2), 89 to 96 (L3), 30 to 35b (H1), 47 to 58 (H2), and 93 to 101 (H3) (MacCallum et al., J. Mol. Biol. 262: 732-745 (1996)); and
[0417] (d) a combination of (a), (b), and/or (c) containing HVR amino acid residues 46 to 56 (L2), 47 to 56 (L2), 48 to 56 (L2), 49 to 56 (L2), 26 to 35 (H1), 26 to 35b (H1), 49 to 65 (H2), 93 to 102 (H3), and 94 to 102 (H3).

[0418] Generally, a single-domain antibody comprises three CDRs: CDR1, CDR2, and CDR3. When a single-domain antibody is a single-domain antibody prepared from a VHH or an antibody VH, the single-domain antibody CDRs exemplarily include the following:
[0419] (a) hypervariable loops occurring at amino acid residues 26 to 32 (CDR1), 53 to 55 (CDR2), and 96 to 101 (CDR3) (Chothia and Lesk, J. Mol. Biol. 196: 901-917 (1987));
[0420] (b) CDRs occurring at amino acid residues 31 to 35b (CDR1), 50 to 65 (CDR2), and 95 to 102 (CDR3) (Kabat et al., Sequences of Proteins of Immunological Interest, 5th Ed. Public Health Service, National Institutes of Health, Bethesda, Md. (1991));
[0421] (c) antigen contacts occurring at amino acid residues 30 to 35b (CDR1), 47 to 58 (CDR2), and 93 to 101 (CDR3) (MacCallum et al., J. Mol. Biol. 262: 732-745 (1996)); and
[0422] (d) a combination of (a), (b), and/or (c), including CDR amino acid residues 26 to 35 (CDR1), 26 to 35b (CDR1), 49 to 65 (CDR2), 93 to 102 (CDR3), or 94 to 102 (CDR3).

[0423] When the single-domain antibody is a single-domain antibody prepared from an antibody VL, the single-domain antibody CDRs exemplarily include the following:
[0424] (a) hypervariable loops occurring at amino acid residues 26 to 32 (CDR1), 50 to 52 (CDR2), and 91 to 96 (CDR3) (Chothia and Lesk, J. Mol. Biol. 196: 901-917 (1987));
[0425] (b) CDRs occurring at amino acid residues 24 to 34 (CDR1), 50 to 56 (CDR2), and 89 to 97 (CDR3) (Kabat et al., Sequences of Proteins of Immunological Interest, 5th Ed. Public Health Service, National Institutes of Health, Bethesda, Md. (1991));
[0426] (c) antigen contacts occurring at amino acid residues 27c to 36 (CDR1), 46 to 55 (CDR2), and 89 to 96 (CDR3) (MacCallum et al., J. Mol. Biol. 262: 732-745 (1996)); and
[0427] (d) a combination of (a), (b), and/or (c), including CDR amino acid residues 46 to 56 (CDR2), 47 to 56 (CDR2), 48 to 56 (CDR2), or 49 to 56 (CDR2).

[0428] In the present specification, CDR residues and other residues (e.g., FR residues) in a variable domain are numbered according to Kabat et al. (supra), unless otherwise specified.

[0429] The term “framework” or “FR” refers to variable domain residues other than complementarity determining region (CDR) residues. FRs in a variable domain generally consist of 4 FR domains: FR1, FR2, FR3, and FR4. Accordingly, the sequences of CDRs and FRs usually appear in VH (or VL) in the following order: FR1-H1 (L1)-FR2-H2 (L2)-FR3-H3 (L3)-FR4. In a single-domain antibody, the sequences of CDRs and FRs generally appear in the following order: FR1-CDR1-FR2-CDR2-FR3-CDR3-FR4.

[0430] Generally, a single-domain antibody of the present invention can be defined as a polypeptide comprising the following:
[0431] a) an amino acid sequence consisting of four framework regions/sequences having three complementarity determining regions/sequences inserted there between (the amino acid residue at position 11 according to Kabat numbering is selected from the group consisting of L, M, S, V, and W, and is preferably L); and/or
[0432] b) an amino acid sequence consisting of four framework regions/sequences having three complementarity determining regions/sequences inserted there between (the amino acid residue at position 37 according to Kabat numbering is selected from the group consisting of F, Y, H, I, L, and V, and is preferably F or Y); and/or
[0433] c) an amino acid sequence consisting of four framework regions/sequences having three complementarity determining regions/sequences inserted there between (the amino acid residue at position 44 according to Kabat numbering is selected from the group consisting of G, E, A, D, Q, R, S, and L, is preferably G, E, or Q, and is more preferably G or E); and/or
[0434] d) an amino acid sequence consisting of four framework regions/sequences having three complementarity determining regions/sequences inserted there between (the amino acid residue at position 45 according to Kabat numbering is selected from the group consisting of L, R, C, I, L, P, Q, and V, and is preferably L or R); and/or
[0435] e) an amino acid sequence consisting of four framework regions/sequences having three complementarity determining regions/sequences inserted there between (the amino acid residue at position 47 according to Kabat numbering is selected from the group consisting of W, L, F, A, G, I, M, R, S, V, and Y, and is preferably W, L, F or R); and/or
[0436] f) an amino acid sequence consisting of four framework regions/sequences having three complementarity determining regions/sequences inserted there between (the amino acid residue at position 83 according to Kabat numbering is selected from the group consisting of R, K, N, E, G, I, M, Q, and T, is preferably K or R, and is more preferably K); and/or
[0437] g) an amino acid sequence consisting of four framework regions/sequences having three complementarity determining regions/sequences inserted there between (the amino acid residue at position 84 according to Kabat numbering is selected from the group consisting of P, A, L, R, S, T, D, and V, and is preferably P); and/or
[0438] h) an amino acid sequence consisting of four framework regions/sequences having three complementarity determining regions/sequences inserted there between (the amino acid residue at position 103 according to Kabat numbering is selected from the group consisting of W, P, R, and S, and is preferably W); and/or
[0439] i) an amino acid sequence consisting of four framework regions/sequences having three complementarity determining regions/sequences inserted there between (the amino acid residue at position 104 according to Kabat numbering is G or D, and is preferably G); and/or
[0440] j) an amino acid sequence consisting of four framework regions/sequences having three complementarity determining regions/sequences inserted there between (the amino acid residue at position 108 according to Kabat numbering is selected from the group consisting of Q, L, and R, and is preferably Q or L).

[0441] More specifically but not exclusively, a single-domain antibody of the present invention can be defined as a polypeptide comprising any one of the amino acid sequences consisting of four framework regions/sequences having three complementarity determining regions/sequences inserted therebetween:
[0442] k) an amino acid sequence in which the amino acid residues at positions 43 to 46 according to Kabat numbering are KERE or KQRE;
[0443] l) an amino acid sequence in which the amino acid residues at positions 44 to 47 according to Kabat numbering are GLEW; and
[0444] m) an amino acid sequence in which the amino acid residues at positions 83 to 84 according to Kabat numbering are KP or EP.

[0445] In the present specification, the term “constant region” or “constant domain” refers to a region or a domain other than variable regions in an antibody. For example, an IgG antibody is a heterotetrameric glycoprotein of approximately 150,000 Da constituted by two identical light chains and two identical heavy chains connected through disulfide bonds. Each heavy chain has a variable region (VH) also called variable heavy chain domain or heavy chain variable domain, followed by a heavy chain constant region (CH) containing a CH1 domain, a hinge region, a CH2 domain, and a CH3 domain, from the N terminus toward the C terminus. Likewise, each light chain has a variable region (VL) also called variable light chain domain or light chain variable domain, followed by a constant light chain (CL) domain, from the N terminus toward the C terminus. The light chains of native antibodies may be attributed to one of two types called kappa (κ) and lambda (λ) on the basis of the amino acid sequences of their constant domains.

[0446] In the present specification, the term “Fc region” herein is used to define a C-terminal region of an immunoglobulin heavy chain that contain at least a portion of the constant region. The term includes native sequence Fc regions and variant Fc regions. In one embodiment, a human IgG1 Fc region extends from Cys226, or from Pro230, to the carboxyl-terminus of the heavy chain. However, the C-terminal lysine (Lys447) or glycine-lysine (Gly446-Lys447) of the Fc region may or may not be present. Unless otherwise specified herein, numbering of amino acid residues in the Fc region or constant region is according to the EU numbering system, also called the EU index, as described in Kabat et al., Sequences of Proteins of Immunological Interest, 5th Ed. Public Health Service, National Institutes of Health, Bethesda, Md. 1991.

[0447] The “class” of an antibody refers to the type of constant domain or constant region possessed by its heavy chain. There are five major classes of antibodies: IgA, IgD, IgE, IgG, and IgM, and several of these may be further divided into subclasses (isotypes), e.g., IgG₁, IgG₂, IgG₃, IgG₄, IgA₁, and IgA₂. The heavy chain constant domains that correspond to the different classes of immunoglobulins are called α, δ, ε, γ, and μ, respectively.

[0448] In the present specification, the “antigen-binding domain” is limited only by binding to the antigen of interest. The antigen-binding domain can be a domain having any structure as long as the domain used binds to the antigen of interest. Examples of such a domain include, but are not limited to, an antibody heavy chain variable region (VH), an antibody light chain variable region (VL), a single-domain antibody (sdAb), a module called A domain of approximately 35 amino acids contained in an in vivo cell membrane protein avimer (WO2004/044011 and WO2005/040229), adnectin containing a 10Fn3 domain serving as a protein binding domain derived from a glycoprotein fibronectin expressed on cell membranes (WO2002/032925), Affibody containing an IgG binding domain scaffold constituting a three-helix bundle composed of 58 amino acids of protein A (WO1995/001937), DARPins (designed ankyrin repeat proteins) which are molecular surface-exposed regions of ankyrin repeats (AR) each having a 33-amino acid residue structure folded into a subunit of a turn, two antiparallel helices, and a loop (WO2002/020565), anticalin having four loop regions connecting eight antiparallel strands bent toward the central axis in one end of a barrel structure highly conserved in lipocalin molecules such as neutrophil gelatinase-associated lipocalin (NGAL) (WO2003/029462), and a depressed region in the internal parallel sheet structure of a horseshoe-shaped fold composed of repeated leucine-rich-repeat (LRR) modules of an immunoglobulin structure-free variable lymphocyte receptor (VLR) as seen in the acquired immune systems of jawless vertebrates such as lamprey or hagfish (WO2008/016854).

[0449] Preferred examples of the antigen-binding domain of the present invention include an antigen-binding domain that can exert an antigen binding function by a molecule constituted only by the antigen-binding domain, and an antigen-binding domain that can exert an antigen binding function by itself after being released from an additional peptide linked thereto. Examples of such an antigen-binding domain include, but are not limited to, single-domain antibodies, scFv, Fv, Fab, Fab′, and F(ab′)2.

[0450] One preferred example of the antigen-binding domain of the present invention includes an antigen-binding domain having a molecular weight of 60 kDa or smaller. Examples of such an antigen-binding domain include, but are not limited to, single-domain antibodies, scFv, Fab, and Fab′. The antigen-binding domain having a molecular weight of 60 kDa or smaller is usually likely to be subjected to clearance by the kidney when existing as a monomer in blood (see J Biol Chem. 1988 Oct. 15; 263 (29): 15064-70). From another viewpoint, one preferred example of the antigen-binding domain of the present invention includes an antigen-binding domain having a half-life in blood of 12 hours or shorter. Examples of such an antigen-binding domain include, but are not limited to, single-domain antibodies, scFv, Fab, and Fab′.

[0451] One preferred example of the antigen-binding domain of the present invention includes a single-domain antibody (sdAb).

[0452] In the present specification, the term “single-domain antibody” is not limited by its structure as long as the domain can exert antigen-binding activity by itself. It is known that a general antibody, for example, an IgG antibody, exhibits antigen-binding activity in a state where a variable region is formed by the pairing of VH and VL, whereas the own domain structure of the single-domain antibody can exert antigen-binding activity by itself without pairing with another domain. Usually, the single-domain antibody has a relatively low molecular weight and exists in the form of a monomer.

[0453] Examples of the single-domain antibody include, but are not limited to, antigen-binding molecules congenitally lacking a light chain, such as VHH of an animal of the family Camelidae and shark VNAR, and antibody fragments containing the whole or a portion of an antibody VH domain or the whole or a portion of an antibody VL domain. Examples of the single-domain antibody which is an antibody fragment containing the whole or a portion of an antibody VH or VL domain include, but are not limited to, artificially prepared single-domain antibodies originating from human antibody VH or human antibody VL as described in U.S. Pat. No. 6,248,516 B1, etc. In some embodiments of the present invention, one single-domain antibody has three CDRs (CDR1, CDR2 and CDR3).

[0454] The single-domain antibody can be obtained from an animal capable of producing the single-domain antibody or by the immunization of the animal capable of producing the single-domain antibody. Examples of the animal capable of producing the single-domain antibody include, but are not limited to, animals of the family Camelidae, and transgenic animals harboring a gene capable of raising the single-domain antibody. The animals of the family Camelidae include camels, lamas, alpacas, one-hump camels and guanacos, etc. Examples of the transgenic animals harboring a gene capable of raising the single-domain antibody include, but are not limited to, transgenic animals described in WO2015/143414 and U.S. Patent Publication No. US2011/0123527 A1. The framework sequences of the single-domain antibody obtained from the animal may be converted to human germline sequences or sequences similar thereto to obtain a humanized single-domain antibody. The humanized single-domain antibody (e.g., humanized VHH) is also one embodiment of the single-domain antibody of the present invention. A “humanized single-domain antibody” refers to a chimeric single-domain antibody comprising amino acid residues from non-human CDRs and amino acid residues from human FRs. In certain embodiments, in a humanized single-domain antibody, all or substantially all CDRs correspond to those of a non-human antibody, and all or substantially all FRs correspond to those of a human antibody. In a humanized antibody, even when a portion of the residues in FR does not correspond to those of a human antibody, substantially all FRs are considered as an example corresponding to those of a human antibody. For example, when humanizing VHH which is an embodiment of the single-domain antibody, a portion of the residues in FR need to be residues not corresponding to those of a human antibody (C Vincke et al., The Journal of Biological Chemistry 284, 3273-3284).

[0455] Alternatively, the single-domain antibody can be obtained by ELISA, panning, or the like from a polypeptide library containing single-domain antibodies. Examples of the polypeptide library containing single-domain antibodies include, but are not limited to, naive antibody libraries obtained from various animals or humans (e.g., Methods in Molecular Biology 2012 911 (65-78); and Biochimica et Biophysica Acta—Proteins and Proteomics 2006 1764: 8 (1307-1319)), antibody libraries obtained by the immunization of various animals (e.g., Journal of Applied Microbiology 2014 117: 2 (528-536)), and synthetic antibody libraries prepared from antibody genes of various animals or humans (e.g., Journal of Biomolecular Screening 2016 21: 1 (35-43); Journal of Biological Chemistry 2016 291:24 (12641-12657); and AIDS 2016 30: 11 (1691-1701)).

[0456] In the present specification, the “antigen” is limited only by containing an epitope to which the antigen-binding domain binds. Preferred examples of the antigen include, but are not limited to, animal- or human-derived peptides, polypeptides, and proteins. Preferred examples of the antigen for use in the treatment of a disease caused by a target tissue include, but are not limited to, molecules expressed on the surface of target cells (e.g., cancer cells and inflammatory cells), molecules expressed on the surface of other cells in tissues containing target cells, molecules expressed on the surface of cells having an immunological role against target cells and tissues containing target cells, and macromolecules present in the stromata of tissues containing target cells.

[0457] Examples of the antigen can include the following molecules: 17-IA, 4-1BB, 4Dc, 6-keto-PGF1a, 8-iso-PGF2a, 8-oxo-dG, A1 adenosine receptor, A33, ACE, ACE-2, activin, activin A, activin AB, activin B, activin C, activin RIA, activin RIA ALK-2, activin RIB ALK-4, activin RIIA, activin RIIB, ADAM, ADAM10, ADAM12, ADAM15, ADAM17/TACE, ADAM8, ADAM9, ADAMTS, ADAMTS4, ADAMTS5, addressin, aFGF, ALCAM, ALK, ALK-1, ALK-7, alpha-1-antitrypsin, alpha-V/beta-1 antagonist, ANG, Ang, APAF-1, APE, APJ, APP, APRIL, AR, ARC, ART, artemin, anti-Id, ASPARTIC, atrial natriuretic factor, av/b3 integrin, Axl, b2M, B7-1, B7-2, B7-H, B-lymphocyte stimulator (BlyS), BACE, BACE-1, Bad, BAFF, BAFF-R, Bag-1, BAK, Bax, BCA-1, BCAM, Bcl, BCMA, BDNF, b-ECGF, bFGF, BID, Bik, BIM, BLC, BL-CAM, BLK, BMP, BMP-2 BMP-2a, BMP-3 osteogenin, BMP-4 BMP-2b, BMP-5, BMP-6 Vgr-1, BMP-7 (OP-1), BMP-8 (BMP-8a, OP-2), BMPR, BMPR-IA (ALK-3), BMPR-IB (ALK-6), BRK-2, RPK-1, BMPR-II (BRK-3), BMP, b-NGF, BOK, bombesin, bone-derived neurotrophic factor, BPDE, BPDE-DNA, BTC, complement factor 3(C3), C3a, C4, C5, C5a, C10, CA125, CAD-8, calcitonin, cAMP, carcinoembryonic antigen (CEA), cancer-associated antigens, cathepsin A, cathepsin B, cathepsin C/DPPI, cathepsin D, cathepsin E, cathepsin H, cathepsin L, cathepsin O, cathepsin S, cathepsin V, cathepsin X/Z/P, CBL, CCI, CCK2, CCL, CCL1, CCL11, CCL12, CCL13, CCL14, CCL15, CCL16, CCL17, CCL18, CCL19, CCL2, CCL20, CCL21, CCL22, CCL23, CCL24, CCL25, CCL26, CCL27, CCL28, CCL3, CCL4, CCL5, CCL6, CCL7, CCL8, CCL9/10, CCR, CCR1, CCR10, CCR10, CCR2, CCR3, CCR4, CCR5, CCR6, CCR7, CCR8, CCR9, CD1, CD2, CD3, CD3E, CD4, CD5, CD6, CD7, CD8, CD10, CD11a, CD11b, CD11c, CD13, CD14, CD15, CD16, CD18, CD19, CD20, CD21, CD22, CD23, CD25, CD27L, CD28, CD29, CD30, CD30L, CD32, CD33 (p67 protein), CD34, CD38, CD40, CD40L, CD44, CD45, CD46, CD49a, CD52, CD54, CD55, CD56, CD61, CD64, CD66e, CD74, CD80 (B7-1), CD89, CD95, CD123, CD137, CD138, CD140a, CD146, CD147, CD148, CD152, CD164, CEACAM5, CFTR, cGMP, CINC, botulinum toxin, Clostridium perfringens toxin, CKb8-1, CLC, CMV, CMV UL, CNTF, CNTN-1, COX, C-Ret, CRG-2, CT-1, CTACK, CTGF, CTLA-4, PD-1, PD-L1, LAG3, TIM3, galectin-9, CX3CL1, CX3CR1, CXCL, CXCL1, CXCL2, CXCL3, CXCL4, CXCL5, CXCL6, CXCL7, CXCL8, CXCL9, CXCL10, CXCL11, CXCL12, CXCL13, CXCL14, CXCL15, CXCL16, CXCR, CXCR1, CXCR2, CXCR3, CXCR4, CXCR5, CXCR6, cytokeratin tumor-associated antigens, DAN, DCC, DcR3, DC-SIGN, decay accelerating factor, des(1-3)-IGF-I (brain IGF-1), Dhh, digoxin, DNAM-1, Dnase, Dpp, DPPIV/CD26, Dtk, ECAD, EDA, EDA-A1, EDA-A2, EDAR, EGF, EGFR (ErbB-1), EMA, EMMPRIN, ENA, endothelin receptor, enkephalinase, eNOS, Eot, eotaxin 1, EpCAM, ephrin B2/EphB4, ePO, ERCC, E-selectin, ET-1, factor IIa, factor VII, factor VIIIc, factor IX, fibroblast-activating protein (FAP), Fas, FcR1, FEN-1, ferritin, FGF, FGF-19, FGF-2, FGF3, FGF-8, FGFR, FGFR-3, fibrin, FL, FLIP, Flt-3, Flt-4, follicle-stimulating hormone, fractalkine, FZD1, FZD2, FZD3, FZD4, FZD5, FZD6, FZD7, FZD8, FZD9, FZD10, G250, Gas6, GCP-2, GCSF, GD2, GD3, GDF, GDF-1, GDF-3 (Vgr-2), GDF-5 (BMP-14, CDMP-1), GDF-6 (BMP-13, CDMP-2), GDF-7 (BMP-12, CDMP-3), GDF-8 (myostatin), GDF-9, GDF-15 (MIC-1), GDNF, GDNF, GFAP, GFRa-1, GFR-alpha 1, GFR-alpha 2, GFR-alpha 3, gITR, glucagon, Glut4, glycoprotein IIb/IIIa (GPIIb/IIIa), GM-CSF, gp130, gp72, GRO, growth hormone-releasing factor, hapten (NP-cap or NIP-cap), HB-EGF, HCC, HCMV gB envelope glycoprotein, HCMV gH envelope glycoprotein, HCMV UL, hematopoietic growth factor (HGF), Hep B gp120, heparanase, Her2, Her2/neu (ErbB-2), Her3 (ErbB-3), Her4 (ErbB-4), herpes simplex virus (HSV) gB glycoprotein, HSV gD glycoprotein, HGFA, high-molecular-weight melanoma-associated antigen (HMW-MAA), HIV gp120, HIV IIIB gp120 V3 loop, HLA, HLA-DR, HM1.24, HMFG PEM, HRG, Hrk, human heart myosin, human cytomegalovirus (HCMV), human growth hormone (HGH), HVEM, 1-309, IAP, ICAM, ICAM-1, ICAM-3, ICE, ICOS, IFNg, Ig, IgA receptor, IgE, IGF, IGF binding protein, IGF-1R, IGFBP, IGF-I, IGF-II, IL, IL-1, IL-1R, IL-2, IL-2R, IL-4, IL-4R, IL-5, IL-5R, IL-6, IL-6R, IL-8, IL-9, IL-10, IL-12, IL-13, IL-15, IL-18, IL-18R, IL-21, IL-23, IL-27, interferon (INF)-alpha, INF-beta, INF-gamma, inhibin, iNOS, insulin chain A, insulin chain B, insulin-like growth factor 1, integrin alpha 2, integrin alpha 3, integrin alpha 4, integrin alpha 4/beta 1, integrin alpha 4/beta 7, integrin alpha 5 (alpha V), integrin alpha 5/beta 1, integrin alpha 5/beta 3, integrin alpha 6, integrin beta 1, integrin beta 2, interferon gamma, IP-10, I-TAC, JE, kallikrein 2, kallikrein 5, kallikrein 6, kallikrein 11, kallikrein 12, kallikrein 14, kallikrein 15, kallikrein L1, kallikrein L2, kallikrein L3, kallikrein L4, KC, KDR, keratinocyte growth factor (KGF), laminin 5, LAMP, LAP, LAP (TGF-1), latent TGF-1, latent TGF-1 bp1, LBP, LDGF, LECT2, lefty, Lewis-Y antigen, Lewis-Y-related antigen, LFA-1, LFA-3, Lfo, LIF, LIGHT, lipoprotein, LIX, LKN, Lptn, L-selectin, LT-a, LT-b, LTB4, LTBP-1, lung surface, luteinizing hormone, lymphotoxin beta receptor, Mac-1, MAdCAM, MAG, MAP2, MARC, MCAM, MCAM, MCK-2, MCP, M-CSF, MDC, Mer, metalloproteinases, MGDF receptor, MGMT, MHC (HLA-DR), MIF, MIG, MIP, MIP-1-alpha, MK, MMAC1, MMP, MMP-1, MMP-10, MMP-11, MMP-12, MMP-13, MMP-14, MMP-15, MMP-2, MMP-24, MMP-3, MMP-7, MMP-8, MMP-9, MPIF, Mpo, MSK, MSP, mucin (Muci), MUC18, mullerian-inhibiting substance, Mug, MuSK, NAIP, NAP, NCAD, N-C adherin, NCA 90, NCAM, NCAM, neprilysin, neurotrophin-3, -4, or -6, neurturin, nerve growth factor (NGF), NGFR, NGF-beta, nNOS, NO, NOS, Npn, NRG-3, NT, NTN, OB, OGGI, OPG, OPN, OSM, OX40L, OX40R, p150, p95, PADPr, parathyroid hormone, PARC, PARP, PBR, PBSF, PCAD, P-cadherin, PCNA, PDGF, PDGF, PDK-1, PECAM, PEM, PF4, PGE, PGF, PGI2, PGJ2, PIN, PLA2, placental alkaline phosphatase (PLAP), P1GF, PLP, PP14, proinsulin, prorelaxin, protein C, PS, PSA, PSCA, prostate-specific membrane antigen (PSMA), PTEN, PTHrp, Ptk, PTN, R51, RANK, RANKL, RANTES, RANTES, relaxin A chain, relaxin B chain, renin, respiratory syncytial virus (RSV) F, RSV Fgp, Ret, rheumatoid factor, RLIP76, RPA2, RSK, S100, SCF/KL, SDF-1, SERINE, serum albumin, sFRP-3, Shh, SIGIRR, SK-1, SLAM, SLPI, SMAC, SMDF, SMOH, SOD, SPARC, Stat, STEAP, STEAP-II, TACE, TACI, TAG-72 (tumor-associated glycoprotein-72), TARC, TCA-3, T cell receptor (e.g., T cell receptor alpha/beta), TdT, TECK, TEM1, TEM5, TEM7, TEM8, TERT, testicular PLAP-like alkaline phosphatase, TfR, TGF, TGF-alpha, TGF-beta, TGF-beta Pan Specific, TGF-beta RI (ALK-5), TGF-beta RII, TGF-beta RIIb, TGF-beta RIII, TGF-beta 1, TGF-beta 2, TGF-beta 3, TGF-beta 4, TGF-beta 5, thrombin, thymus Ck-1, thyroid stimulating hormone, Tie, TIMP, TIQ, tissue factor, TMEFF2, Tmpo, TMPRSS2, TNF, TNF-alpha, TNF-alpha/beta, TNF-beta 2, TNFc, TNF-RI, TNF-RII, TNFRSF10A (TRAIL R1 Apo-2, DR4), TNFRSF10B (TRAIL R2 DR5, KILLER, TRICK-2A, TRICK-B), TNFRSF10C (TRAIL R3 DcR1, LIT, TRID), TNFRSF10D (TRAIL R4 DcR2, TRUNDD), TNFRSF1TA (RANK ODF R, TRANCE R), TNFRSF11B (OPG OCIF, TR1), TNFRSF12 (TWEAK R FN14), TNFRSF13B (TACI), TNFRSF13C (BAFF R), TNFRSF14 (HVEM ATAR, HveA, LIGHT R, TR2), TNFRSF16 (NGFR p75NTR), TNFRSF17 (BCMA), TNFRSF18 (GITR AITR), TNFRSF19 (TROY TAJ, TRADE), TNFRSF19L (RELT), TNFRSF1A (TNF RI CD120a, p55-60), TNFRSF1B (TNF RII CD120b, p75-80), TNFRSF26 (TNFRH3), TNFRSF3 (LTbR TNF RIII, TNFC R), TNFRSF4 (OX40 ACT35, TXGP1 R), TNFRSF5 (CD40 p50), TNFRSF6 (Fas Apo-1, APT1, CD95), TNFRSF6B (DcR3 M68, TR6), TNFRSF7 (CD27), TNFRSF8 (CD30), TNFRSF9 (4-1BB CD137, ILA), TNFRSF21 (DR6), TNFRSF22 (DcTRAIL R2 TNFRH2), TNFRST23 (DcTRAIL RI TNFRH1), TNFRSF25 (DR3 Apo-3, LARD, TR-3, TRAMP, WSL-1), TNFSF10 (TRAIL Apo-2 ligand, TL2), TNFSF11 (TRANCE/RANK ligand ODF, OPG ligand), TNFSF12 (TWEAK Apo-3 ligand, DR3 ligand), TNFSF13 (APRIL TALL2), TNFSF13B (BAFF BLYS, TALL1, THANK, TNFSF20), TNFSF14 (LIGHT HVEM ligand, LTg), TNFSF15 (TL1A/VEGI), TNFSF18 (GITR ligand AITR ligand, TL6), TNFSF1A (TNF-a Conectin, DIF, TNFSF2), TNFSFB (TNF-b LTa, TNFSF1), TNFSF3 (LTb TNFC, p33), TNFSF4 (OX40 ligand gp34, TXGP1), TNFSF5 (CD40 ligand CD154, gp39, HIGM1, IMD3, TRAP), TNFSF6 (Fas ligand Apo-1 ligand, APT1 ligand), TNFSF7 (CD27 ligand CD70), TNFSF8 (CD30 ligand CD153), TNFSF9 (4-1BB ligand CD137 ligand), TP-1, t-PA, Tpo, TRAIL, TRAIL R, TRAIL-RI, TRAIL-R2, TRANCE, transferrin receptor, TRF, Trk, TROP-2, TLR (toll-like receptor) 1, TLR2, TLR3, TLR4, TLR5, TLR6, TLR7, TLR8, TLR9, TLR10, TSG, TSLP, tumor-associated antigen CA125, tumor-associated antigen-expressing Lewis-Y-related carbohydrate, TWEAK, TXB2, Ung, uPAR, uPAR-1, urokinase, VCAM, VCAM-1, VECAD, VE-cadherin, VE-cadherin-2, VEFGR-1 (fit-1), VEGF, VEGFR, VEGFR-3 (flt-4), VEGI, VIM, viral antigens, VLA, VLA-1, VLA-4, VNR integrin, von Willebrand factor, WIF-1, WNT1, WNT2, WNT2B/13, WNT3, WNT3A, WNT4, WNT5A, WNT5B, WNT6, WNT7A, WNT7B, WNT8A, WNT8B, WNT9A, WNT9A, WNT9B, WNT10A, WNT10B, WNT11, WNT16, XCL1, XCL2, XCR1, XCR1, XEDAR, XIAP, XPD, HMGB1, IgA, As, CD81, CD97, CD98, DDR1, DKK1, EREG, Hsp90, IL-17/IL-17R, IL-20/IL-20R, oxidized LDL, PCSK9, prekallikrein, RON, TMEM16F, SOD1, chromogranin A, chromogranin B, tau, VAP1, high-molecular-weight kininogen, IL-31, IL-31R, Nav1.1, Nav1.2, Nav1.3, Nav1.4, Nav1.5, Nav1.6, Nav1.7, Nav1.8, Nav1.9, EPCR, C1, C1q, C1r, C1s, C2, C2a, C2b, C3, C3a, C3b, C4, C4a, C4b, C5, C5a, C5b, C6, C7, C8, C9, factor B, factor D, factor H, properdin, sclerostin, fibrinogen, fibrin, prothrombin, thrombin, tissue factor, factor V, factor Va, factor VII, factor VIIa, factor VIiI, factor VIIIa, factor IX, factor IXa, factor X, factor Xa, factor XI, factor XIa, factor XII, factor XIIa, factor XIII, factor XIIIa, TFPI, antithrombin III, EPCR, thrombomodulin, TAPI, tPA, plasminogen, plasmin, PAI-1, PAI-2, GPC3, syndecan-1, syndecan-2, syndecan-3, syndecan-4, LPA, SIP, and receptors for hormones or growth factors.

[0458] Although the examples of the antigen listed above also include receptors, these receptors even existing in a soluble form in a body fluid can be used as the antigen to which the antigen-binding domain of the present invention binds. One non-limiting example of the soluble form of such a receptor can include the protein represented by SEQ ID NO: 35 which is soluble IL-6R as described by Mullberg et al. (J. Immunol. (1994) 152 (10), 4958-4968).

[0459] The examples of the antigen listed above include membrane molecules expressed on cell membranes, and soluble molecules secreted from cells to the outside of the cells. When the antigen-binding domain of the present invention binds to a soluble molecule secreted from cells, the antigen-binding domain preferably has neutralizing activity.

[0460] The solution containing the soluble molecule is not limited, and this soluble molecule may exist in a body fluid, i.e., every vascular liquid or every liquid filling between tissues or cells in living bodies. In a non-limiting aspect, the soluble molecule to which the antigen-binding domain of the present invention binds can exist in an extracellular fluid. The extracellular fluid refers to a generic name for plasma, intercellular fluid, lymph, tight connective tissues, cerebrospinal fluid, spinal fluid, aspirates, synovial fluid, or such components in the bone and cartilage, alveolar fluid (bronchoalveolar lavage fluid), ascitic fluid, pleural effusion, cardiac effusion, cyst fluid, aqueous humor (hydatoid), or such transcellular fluids (various fluids in glandular cavities resulting from the active transport or secretory activity of cells, and fluids in the lumen of the gut and other body cavities) in vertebrates.

[0461] The epitope, which means an antigenic determinant, present in the antigen means a site on the antigen to which the antigen-binding domain disclosed in the present specification binds. Accordingly, for example, the epitope can be defined by its structure.

[0462] Alternatively, the epitope may be defined by the antigen-binding activity of the antigen-binding domain recognizing the epitope. When the antigen is a peptide or a polypeptide, the epitope may be identified by amino acid residues constituting the epitope. When the epitope is a sugar chain, the epitope may be identified by a particular sugar chain structure.

[0463] A linear epitope refers to an epitope comprising an epitope that is recognized by its primary sequence of amino acids. The linear epitope contains typically at least 3 and most commonly at least 5, for example, approximately 8 to approximately 10 or 6 to 20 amino acids, in its unique sequence.

[0464] In contrast to the linear epitope, a conformational epitope refers to an epitope that is contained in a primary sequence of amino acids containing a component other than the single defined component of the epitope to be recognized (e.g., an epitope whose primary sequence of amino acids may not be recognized by an antibody that determines the epitope). The conformational epitope may contain an increased number of amino acids, as compared with the linear epitope. As for the recognition of the conformational epitope, the antigen-binding domain recognizes the three-dimensional structure of the peptide or the protein. For example, when a protein molecule is folded to form a three-dimensional structure, certain amino acids and/or polypeptide main chain constituting the conformational epitope are arranged in parallel to allow the antibody to recognize the epitope. Examples of the method for determining the conformation of the epitope include, but are not limited to, X-ray crystallography, two-dimensional nuclear magnetic resonance spectroscopy, and site-specific spin labeling and electron paramagnetic resonance spectroscopy. See, for example, Epitope Mapping Protocols in Methods in Molecular Biology (1996), Vol. 66, Morris ed.

[0465] The structure of the antigen-binding domain binding to the epitope is called paratope. The paratope stably binds to the epitope through a hydrogen bond, electrostatic force, van der Waals' forces, a hydrophobic bond, or the like acting between the epitope and the paratope. This binding force between the epitope and the paratope is called affinity. The total binding force when a plurality of antigen-binding domains bind to a plurality of antigens is called avidity. The affinity works synergistically when, for example, an antibody comprising a plurality of antigen-binding domains (i.e., a polyvalent antibody) bind to a plurality of epitopes. Therefore, the avidity is higher than the affinity.

[0466] In a particular embodiment, the antigen-binding domain provided in the present specification has a dissociation constant (Kd) of ≤1 μM, ≤100 nM, ≤10 nM, ≤1 nM, ≤0.1 nM, ≤0.01 nM or ≤0.001 nM (e.g., 10⁻⁸ M or less, for example, 10⁻⁸ M to 10⁻¹³ M, for example, 10⁻⁹ M to 10⁻¹³ M).

[0467] Hereinafter, exemplary methods for confirming the binding of an antigen-binding domain directed to IL-6R, or a polypeptide comprising the antigen-binding domain to the epitope will be shown. However, a method for confirming the binding of an antigen-binding domain directed to an antigen other than IL-6R, or a polypeptide comprising the antigen-binding domain to the epitope can also be appropriately carried out according to the example given below.

[0468] For example, whether the antigen-binding domain directed to IL-6R recognizes a linear epitope present in the IL-6R molecule can be confirmed, for example, as follows: a linear peptide comprising an amino acid sequence constituting the extracellular domain of IL-6R is synthesized for the purpose described above. The peptide can be chemically synthesized. Alternatively, the peptide is obtained by a genetic engineering approach using a region encoding an amino acid sequence corresponding to the extracellular domain in IL-6R cDNA. Next, the antigen-binding domain directed to IL-6R is evaluated for its binding activity against the linear peptide comprising an amino acid sequence constituting the extracellular domain. For example, the binding activity of the antigen-binding domain against the peptide can be evaluated by ELISA using an immobilized linear peptide as an antigen. Alternatively, the binding activity against the linear peptide may be determined on the basis of a level at which the linear peptide inhibits the binding of the antigen-binding domain to IL-6R-expressing cells. These tests can determine the binding activity of the antigen-binding domain against the linear peptide.

[0469] Also, whether the antigen-binding domain directed to IL-6R recognizes the conformational epitope can be confirmed as follows: IL-6R-expressing cells are prepared for the purpose described above. The recognition of the conformational epitope by the antigen-binding domain directed to IL-6R is confirmed, for example, when the antigen-binding domain directed to IL-6R strongly binds to the IL-6R-expressing cells upon contact with the cells, whereas the antigen-binding domain does not substantially bind to an immobilized linear peptide comprising an amino acid sequence constituting the extracellular domain of IL-6R or a denatured (using a general denaturant such as guanidine) linear peptide comprising an amino acid sequence constituting the extracellular domain of IL-6R. In this context, the term “not substantially bind” means that the binding activity is 80% or less, usually 50% or less, preferably 30% or less, particularly preferably 15% or less of binding activity against cells expressing human IL-6R.

[0470] The methods for confirming the antigen-binding activity of the antigen-binding domain also include methods of measuring a Kd value by, for example, radiolabeled antigen binding assay (RIA). In one embodiment, RIA is carried out using the antigen-binding domain of interest and its antigen. For example, the binding affinity in a solution of the antigen-binding domain for the antigen is measured by equilibrating the antigen-binding domain with a minimal concentration of a (125I)-labeled antigen in the presence of a titration series of an unlabeled antigen, and subsequently capturing the bound antigen by a plate coated with the antigen-binding domain (see e.g., Chen et al., J. Mol. Biol. 293: 865-881(1999)).

[0471] According to an alternative embodiment, Kd is measured by a surface plasmon resonance method using BIACORE (registered trademark). For example, assay using BIACORE (registered trademark)-2000 or BIACORE (registered trademark)-3000 (BIAcore, Inc., Piscataway, N.J.) is carried out at 25° C. using a CM5 chip with approximately 10 response units (RU) of the antigen immobilized thereon. In one embodiment, a carboxymethylated dextran biosensor chip (CM5, BIAcore, Inc.) is activated using N-ethyl-N′-(3-dimethylaminopropyl)-carbodiimide hydrochloride (EDC) and N-hydroxysuccinimide (NHS) according to the supplier's instruction. The antigen is diluted to 5 μg/ml (approximately 0.2 μM) with 10 mM sodium acetate (pH 4.8) and then injected thereto at a flow rate of 5 μl/min so as to attain protein binding at approximately 10 response units (RU). After the antigen injection, 1 M ethanolamine is injected thereto in order to block unreacted groups. For kinetic measurement, 2-fold dilutions (0.78 nM to 500 nM) of the antigen-binding domain in PBS containing 0.05% Polysorbate 20 (TWEEN-20 (trademark)) as a surfactant (PBST) are injected thereto at a flow rate of approximately 25 μl/min at 25° C. An association rate (kon) and a dissociation rate (koff) are calculated by fitting sensorgrams of association and dissociation at the same time using a simple 1:1 Langmuir binding model (BIACORE (registered trademark) evaluation software version 3.2). An equilibrium dissociation constant (Kd) is calculated as a koff/kon ratio. Furthermore, an apparent dissociation constant (Kd) may be determined by use of equilibrium analysis. For these procedures, see the protocol attached to BIACORE (registered trademark). See, for example, Chen et al., J. Mol. Biol. 293: 865-881 (1999) and Methods Enzymol. 2000; 323: 325-40. In the surface plasmon resonance assay, the amount of the protein immobilized, the amount of the protein used in reaction, temperature, and solution composition can be variously changed by those skilled in the art. When the on-rate in the surface plasmon resonance assay described above exceeds 106 M-1s-1, the on-rate can be determined by use of a fluorescence quenching technique of using a spectrometer (e.g. a stopped-flow spectrophotometer (Aviv Instruments, Inc.) or SLM-AMINCO (trademark) spectrophotometer 8000 series (Thermo Spectronic/Thermo Fisher Scientific Inc.) using a stirring cuvette) to measure increase or decrease in fluorescence intensity (excitation=295 nm; emission=340 nm, band path: 16 nm) at 25° C. for 20 nM antigen-binding domain in PBS (pH 7.2) in the presence of gradually increased concentrations of the antigen.

[0472] Furthermore, the antigen-binding activity of the antigen-binding domain can also be measured by a known molecule-molecule interaction measurement method such as electrogenerated chemiluminescence.

[0473] Examples of the method for measuring the binding activity of the antigen-binding domain directed to IL-6R against the IL-6R-expressing cells include methods described in Antibodies: A Laboratory Manual (Ed Harlow, David Lane, Cold Spring Harbor Laboratory (1988) 359-420). Specifically, the binding activity can be evaluated on the basis of the principle of ELISA or FACS (fluorescence activated cell sorting) using the IL-6R-expressing cells as an antigen.

[0474] In the ELISA format, the binding activity of the antigen-binding domain directed to IL-6R against the IL-6R-expressing cells is quantitatively evaluated by comparing the levels of signals generated through enzymatic reaction. Specifically, a test antigen-binding domain is added to an ELISA plate with the IL-6R-expressing cells immobilized thereon. Then, the test antigen-binding domain bound with the cells is detected through the use of an enzyme-labeled antibody recognizing the test antigen-binding domain. Alternatively, in the FACS, a dilution series of a test antigen-binding domain is prepared, and the antibody binding titer for the IL-6R-expressing cells can be determined to compare the binding activity of the test antigen-binding domain against the IL-6R-expressing cells.

[0475] The binding of the test antigen-binding domain to the antigen expressed on the surface of cells suspended in a buffer solution or the like can be detected using a flow cytometer. For example, the following apparatuses are known as the flow cytometer:

[0476] FACSCanto™ II

[0477] FACSAria™

[0478] FACSArray™

[0479] FACSVantage™ SE

[0480] FACSCalibur™ (all are trade names of BD Biosciences)

[0481] EPICS ALTRA HyPerSort

[0482] Cytomics FC 500

[0483] EPICS XL-MCL ADC EPICS XL ADC

[0484] Cell Lab Quanta/Cell Lab Quanta SC (all are trade names of Beckman Coulter, Inc.)

[0485] One preferred example of the method for measuring the antigen-binding activity of the antigen-binding domain directed to IL-6R includes the following method: first, IL-6R-expressing cells reacted with a test antigen-binding domain are stained with a FITC-labeled secondary antibody recognizing the test antigen-binding domain. The test antigen-binding domain is appropriately diluted with a suitable buffer solution to prepare the antigen-binding domain at the desired concentration for use. The antigen-binding domain can be used, for example, at any concentration from 10 μg/ml to 10 ng/ml. Next, fluorescence intensity and the number of cells are measured using FACSCalibur (Becton, Dickinson and Company). The amount of the antigen-binding domain bound to the cells is reflected in the fluorescence intensity obtained by analysis using CELL QUEST Software (Becton, Dickinson and Company), i.e., a geometric mean value. In short, the binding activity of the test antigen-binding domain indicated by the amount of the test antigen-binding domain bound can be determined by obtaining the geometric mean value.

[0486] Whether the antigen-binding domain directed to IL-6R shares an epitope with a certain antigen-binding domain can be confirmed by the competition between these antigen-binding domains for the same epitope. The competition between the antigen-binding domains is detected by cross-blocking assay or the like. The cross-blocking assay is preferably, for example, competitive ELISA assay.

[0487] Specifically, in the cross-blocking assay, IL-6R protein-coated wells of a microtiter plate are preincubated in the presence or absence of a candidate competitive antigen-binding domain. Then, a test antigen-binding domain is added thereto. The amount of the test antigen-binding domain bound with the IL-6R protein in the wells indirectly correlates with the binding capacity of the candidate competitive antigen-binding domain that competes for the binding to the same epitope. In short, larger affinity of the competitive antigen-binding domain for the same epitope means lower binding activity of the test antigen-binding domain against the IL-6R protein-coated wells.

[0488] The amount of the test antigen-binding domain bound with the wells via the IL-6R protein can be easily measured by labeling the antigen-binding domain in advance. For example, a biotin-labeled antigen-binding domain is assayed by using an avidin-peroxidase conjugate and an appropriate substrate. In particular, cross-blocking assay that utilizes enzyme labels such as peroxidase is called competitive ELISA assay. The antigen-binding domain can be labeled with an alternative detectable or measurable labeling material. Specifically, radiolabels, fluorescent labels, and the like are known in the art.

[0489] Provided that the competitive antigen-binding domain can block the binding of the antigen-binding domain directed to IL-6R by at least 20%, preferably at least 20 to 50%, more preferably at least 50% as compared with binding activity obtained in a control test carried out in the absence of the candidate competitive antigen-binding domain, the test antigen-binding domain is determined as an antigen-binding domain substantially binding to the same epitope as that for the competitive antigen-binding domain, or competing for the binding to the same epitope.

[0490] When the epitope to which the antigen-binding domain directed to IL-6R binds has an identified structure, whether a test antigen-binding domain and a control antigen-binding domain share an epitope can be evaluated by comparing the binding activity of these antigen-binding domains against a peptide or a polypeptide prepared by introducing an amino acid mutation to a peptide constituting the epitope.

[0491] In such a method for measuring binding activity, for example, the binding activity of a test antigen-binding domain and a control antigen-binding domain against a linear peptide containing an introduced mutation can be compared in the ELISA format described above. In a method other than ELISA, the binding activity against the mutant peptide bound with a column may be measured by flowing the test antigen-binding domain and the control antigen-binding domain in the column, and then quantifying the antigen-binding domain eluted in the eluate. A method for adsorbing a mutant peptide, for example, as a fusion peptide with GST, to a column is known in the art.

[0492] When the identified epitope is a conformational epitope, whether a test antigen-binding domain and a control antigen-binding domain share an epitope can be evaluated by the following method: first, IL-6R-expressing cells and cells expressing IL-6R with a mutation introduced to the epitope are prepared. The test antigen-binding domain and the control antigen-binding domain are added to cell suspensions containing these cells suspended in an appropriate buffer solution such as PBS. Subsequently, the cell suspensions are appropriately washed with a buffer solution, and a FITC-labeled antibody capable of recognizing the test antigen-binding domain and the control antigen-binding domain is then added thereto. The fluorescence intensity and the number of cells stained with the labeled antibody are measured using FACSCalibur (Becton, Dickinson and Company). The test antigen-binding domain and the control antigen-binding domain are appropriately diluted with a suitable buffer solution and used at concentrations thereby adjusted to the desired ones. These antigen-binding domains are used, for example, at any concentration from 10 μg/ml to 10 ng/ml. The amount of the labeled antibody bound to the cells is reflected in the fluorescence intensity obtained by analysis using CELL QUEST Software (Becton, Dickinson and Company), i.e., a geometric mean value. In short, the binding activity of the test antigen-binding domain and the control antigen-binding domain indicated by the amount of the labeled antibody bound can be determined by obtaining the geometric mean value.

[0493] The competition of the antigen-binding domain with another antigen-binding domain for the same epitope can also be confirmed by use of radiolabeled antigen binding assay (RIA), BIACORE (registered trademark) surface plasmon resonance assay, electrogenerated chemiluminescence, or the like, in addition to ELISA or FACS described above.

[0494] In the present method, whether to “not substantially bind to cells expressing mutant IL-6R” can be determined, for example, by the following method: first, a test antigen-binding domain and a control antigen-binding domain bound with the cells expressing mutant IL-6R are stained with a labeled antibody. Subsequently, the fluorescence intensity of the cells is detected. In the case of using FACSCalibur in the fluorescence detection by flow cytometry, the obtained fluorescence intensity can be analyzed using the CELL QUEST Software. From geometric mean values obtained in the presence and absence of the polypeptide association product, their comparison value (AGeo-Mean) can be calculated according to expression 1 given below to determine the rate of increase in fluorescence intensity caused by the binding of the antigen-binding domain.

ΔGeo-Mean=Geo-Mean (in the presence of the polypeptide association product)/Geo-Mean (in the absence of the polypeptide association product) (Expression 1)

[0495] The geometric mean comparison value (ΔGeo-Mean value for the mutant IL-6R molecule) thus obtained by analysis, which reflects the amount of the test antigen-binding domain bound with the cells expressing mutant IL-6R, is compared with the ΔGeo-Mean comparison value that reflects the amount of the test antigen-binding domain bound to the IL-6R-expressing cells. In this case, the concentrations of the test antigen-binding domain used for determining the ΔGeo-Mean comparison values for the cells expressing mutant IL-6R and the IL-6R-expressing cells are particularly preferably adjusted to equal or substantially equal concentrations. An antigen-binding domain already confirmed to recognize an epitope in IL-6R is used as the control antigen-binding domain.

[0496] Provided that the ΔGeo-Mean comparison value of the test antigen-binding domain for the cells expressing mutant IL-6R is smaller than at least 80%, preferably 50%, more preferably 30%, particularly preferably 15% of the ΔGeo-Mean comparison value of the test antigen-binding domain for the IL-6R-expressing cells, the test antigen-binding domain “does not substantially bind to cells expressing mutant IL-6R”. The calculation expression for determining the Geo-Mean (geometric mean) value is described in the CELL QUEST Software User's Guide (BD biosciences). The epitope for the test antigen-binding domain and that for the control antigen-binding domain can be assessed as being the same when their comparison values can be regarded as being substantially equivalent as a result of comparison.

[0497] In the present specification, the term “carrying moiety” refers to a moiety other than an antigen-binding domain in a polypeptide. The carrying moiety of the present invention is usually a peptide or a polypeptide constituted by amino acids. In a specific embodiment, the carrying moiety in the polypeptide is linked to the antigen-binding domain via a cleavage site. The carrying moiety of the present invention may be a series of peptides or polypeptides connected through an amide bond(s), or may be a complex formed from a plurality of peptides or polypeptides through a covalent bond(s) such as a disulfide bond or a noncovalent bond such as a hydrogen bond or hydrophobic interaction.

[0498] The carrying moiety of the present invention has an inhibiting domain that inhibits the antigen-binding activity of the antigen-binding domain. In the present specification, the term “inhibiting domain” is limited only by the inhibition the antigen-binding activity of the antigen-binding domain. The inhibiting domain can be a domain having any structure as long as the domain used can inhibit the antigen-binding activity of the antigen-binding domain. Examples of such an inhibiting domain include, but are not limited to, antibody heavy chain variable regions (VH), antibody light chain variable regions (VL), pre-B cell receptors, and single-domain antibodies. The inhibiting domain may constitute the whole of the carrying moiety or may constitute a portion of the carrying moiety.

[0499] In some embodiments of the present invention, the antigen-binding domain released from the polypeptide has higher antigen-binding activity than that before the release. In other words, the antigen-binding activity of the antigen-binding domain is inhibited by the inhibiting domain in a state where the antigen-binding domain is unreleased from the polypeptide. Whether the antigen-binding activity of the antigen-binding domain is inhibited by the inhibiting domain is confirmed by a method such as FACS (fluorescence activated cell sorting), ELISA (enzyme-linked immunosorbent assay), ECL (electrogenerated chemiluminescence), a SPR (surface plasmon resonance) method (Biacore), BLI (biolayer interferometry) (Octet). In some embodiments of the present invention, the antigen-binding activity of the antigen-binding domain released from the polypeptide is a value equal to or greater than twice, 3 times, 4 times, 5 times, 6 times, 7 times, 8 times, 9 times, 10 times, 20 times, 30 times, 40 times, 50 times, 60 times, 70 times, 80 times, 90 times, 100 times, 200 times, 300 times, 400 times, 500 times, 600 times, 700 times, 800 times, 900 times, 1000 times, 2000 times, or 3000 times the binding activity of the antigen-binding domain unreleased from the polypeptide. In some more specific embodiments of the present invention, the binding of the antigen-binding domain before the release to the antigen is not seen when the antigen-binding activity of the antigen-binding domain is measured by one method selected from among the methods described above.

[0500] In some aspects of the present invention, the cleavage site is cleaved so that the antigen-binding domain becomes capable of being released from the polypeptide. In such aspects, therefore, the antigen-binding activity can be compared between before and after the cleavage of the polypeptide. Specifically, the antigen-binding activity measured using the cleaved polypeptide is a value equal to or greater than twice, 3 times, 4 times, 5 times, 6 times, 7 times, 8 times, 9 times, 10 times, 20 times, 30 times, 40 times, 50 times, 60 times, 70 times, 80 times, 90 times, 100 times, 200 times, 300 times, 400 times, 500 times, 600 times, 700 times, 800 times, 900 times, 1000 times, 2000 times, or 3000 times the antigen-binding activity measured using the uncleaved polypeptide. In some more specific embodiments, the binding of the antigen-binding domain of the uncleaved polypeptide to the antigen is not seen when the antigen-binding activity is measured by one method selected from among the methods described above.

[0501] In some aspects of the present invention, the cleavage site is cleaved by protease. In such aspects, therefore, the antigen-binding activity can be compared between before and after the protease treatment of the polypeptide. Specifically, the antigen-binding activity measured using the polypeptide after the protease treatment is a value equal to or greater than twice, 3 times, 4 times, 5 times, 6 times, 7 times, 8 times, 9 times, 10 times, 20 times, 30 times, 40 times, 50 times, 60 times, 70 times, 80 times, 90 times, 100 times, 200 times, 300 times, 400 times, 500 times, 600 times, 700 times, 800 times, 900 times, 1000 times, 2000 times, or 3000 times the antigen-binding activity measured using the polypeptide without the protease treatment. In some more specific embodiments, the binding of the antigen-binding domain of the protease-untreated polypeptide to the antigen is not seen when the antigen-binding activity is measured by one method selected from among the methods described above.

[0502] In the present invention, the polypeptide comprising an antigen-binding domain and a carrying moiety has a longer half-life in blood than that of the antigen-binding domain existing alone. In some embodiments of the present invention, for the longer half-life of the polypeptide, the carrying moiety is designed so as to have a longer half-life in blood. In such embodiments, examples of the approach of extending the half-life in blood of the carrying moiety include, but are not limited to, a large molecular weight of the carrying moiety, FcRn-binding activity possessed by the carrying moiety, albumin-binding activity possessed by the carrying moiety, and the PEGylation of the carrying moiety. In some embodiments of the present invention, the carrying moiety has a longer half-life in blood than that of the antigen-binding domain (in other words, the antigen-binding domain has a shorter half-life in blood than that of the carrying moiety).

[0503] In the present invention, the half-lives of the antigen-binding domain alone and the polypeptide, or the half-lives in blood of the antigen-binding domain and the carrying moiety are preferably compared in terms of their half-lives in blood in humans. If the half-lives in blood are difficult to measure in humans, the half-lives in blood in humans can be predicted on the basis of their half-lives in blood in mice (e.g., normal mice, transgenic mice expressing a human antigen, and transgenic mice expressing human FcRn) or monkeys (e.g., cynomolgus monkeys).

[0504] In one embodiment, the approach of extending the half-life in blood of the carrying moiety includes a large molecular weight of the carrying moiety. In one embodiment, the approach of rendering the half-life in blood of the carrying moiety longer than that of the antigen-binding domain includes making the molecular weight of the carrying moiety be higher than that of the antigen-binding domain.

[0505] In one embodiment, the approach of extending the half-life in blood of the carrying moiety includes conferring FcRn-binding activity to the carrying moiety. The carrying moiety can usually possess FcRn-binding activity by a method of establishing a FcRn-binding region in the carrying moiety. The FcRn-binding region refers to a region having binding activity against FcRn and may have any structure as long as the region used has binding activity against FcRn.

[0506] The carrying moiety containing a FcRn-binding region is capable of being taken up into cells and then brought back into plasma through the salvage pathway of FcRn. For example, an IgG molecule has a relatively long circulation time in plasma (slow disappearance) because FcRn known as a salvage receptor of the IgG molecule functions. An IgG molecule taken up into the endosome through pinocytosis binds to FcRn expressed in the endosome under intraendosomal acidic conditions. An IgG molecule that has failed to bind to FcRn is moved to the lysosome and degraded therein, whereas the IgG molecule bound with FcRn is transferred to cell surface, then dissociated from the FcRn under neutral conditions in plasma, and thereby brought back into plasma.

[0507] The FcRn-binding region is preferably a region binding directly to FcRn. Preferred examples of the FcRn-binding region can include antibody Fc regions. However, a region capable of binding to a polypeptide, such as albumin or IgG, which has FcRn-binding ability is capable of binding indirectly to FcRn via albumin, IgG, or the like. Therefore, the FcRn-binding region according to the present invention may be a region binding to such a polypeptide having FcRn-binding ability.

[0508] The binding activity of the FcRn-binding region according to the present invention against FcRn, particularly, human FcRn may be measured by a method known to those skilled in the art, as mentioned in the above section about binding activity. The conditions therefor may be appropriately determined by those skilled in the art. The binding activity against human FcRn can be evaluated as KD (dissociation constant), apparent KD (apparent dissociation constant), kd (dissociation rate), or apparent kd (apparent dissociation rate), etc. These values can be measured by methods known to those skilled in the art. For example, Biacore (GE Healthcare Japan Corp.), Scatchard plot, flow cytometers, and the like can be used.

[0509] The conditions for measuring the binding activity of the FcRn-binding region against FcRn are not particularly limited and may be appropriately selected by those skilled in the art. The binding activity can be measured under conditions involving, for example, a MES buffer and at 37° C., as described in WO2009/125825. Also, the binding activity of the FcRn-binding region of the present invention against FcRn may be measured by a method known to those skilled in the art and can be measured using, for example, Biacore (GE Healthcare Japan Corp.). In the measurement of the binding activity of the FcRn-binding region against FcRn, FcRn and the FcRn-binding region or the carrying moiety containing the FcRn-binding region can be injected as analytes to chips onto which the FcRn-binding region or the carrying moiety containing the FcRn-binding region and FcRn, respectively, are immobilized, followed by evaluation.

[0510] As for pH for use in the measurement conditions, the binding affinity of the FcRn-binding region for FcRn may be evaluated at any pH of 4.0 to 6.5. Preferably, a pH of 5.8 to 6.0, which is close to pH in the early endosome in vivo, is used for determining the binding affinity of the FcRn-binding region for human FcRn. As for temperature for use in the measurement conditions, the binding affinity of the FcRn-binding region for FcRn may be evaluated at any temperature of 10° C. to 50° C. Preferably, a temperature of 15° C. to 40° C. is used for determining the binding affinity of the FcRn-binding region for human FcRn. More preferably, any temperature from 20° C. to 35° C., for example, any one of 20, 21, 22, 23, 24, 25, 26, 27, 28, 29, 30, 31, 32, 33, 34, and 35° C., is also used for determining the binding affinity of the FcRn-binding region for FcRn. The temperature of 25° C. is one non-limiting example of the embodiments of the present invention.

[0511] One example of the FcRn-binding region includes, but is not limited to, an IgG antibody Fc region. In the case of using an IgG antibody Fc region, its type is not limited, and for example, IgG1, IgG2, IgG3, or IgG4 Fc region may be used. For example, an Fc region containing one sequence selected from the amino acid sequences represented by SEQ ID NOs: 21, 22, 23, and 24 may be used.

[0512] A native IgG antibody Fc region as well as an Fc region variant having one or more amino acid substitutions may be used as long as the Fc region has FcRn-binding activity. For example, an Fc region variant containing an amino acid sequence derived from an IgG antibody Fc region by the substitution of at least one amino acid selected from EU numbering positions 237, 238, 239, 248, 250, 252, 254, 255, 256, 257, 258, 265, 270, 286, 289, 297, 298, 303, 305, 307, 308, 309, 311, 312, 314, 315, 317, 325, 332, 334, 360, 376, 380, 382, 384, 385, 386, 387, 389, 424, 428, 433, 434 and 436 with another amino acid may be used.

[0513] More specifically, an Fc region variant containing at least one amino acid substitution selected from
[0514] an amino acid substitution to substitute Gly at position 237 with Met,
[0515] an amino acid substitution to substitute Pro at position 238 with Ala,
[0516] an amino acid substitution to substitute Ser at position 239 with Lys,
[0517] an amino acid substitution to substitute Lys at position 248 with Ile,
[0518] an amino acid substitution to substitute Thr at position 250 with Ala, Phe, Ile, Met, Gln, Ser, Val, Trp, or Tyr,
[0519] an amino acid substitution to substitute Met at position 252 with Phe, Trp, or Tyr,
[0520] an amino acid substitution to substitute Ser at position 254 with Thr,
[0521] an amino acid substitution to substitute Arg at position 255 with Glu,
[0522] an amino acid substitution to substitute Thr at position 256 with Asp, Glu, or Gln,
[0523] an amino acid substitution to substitute Pro at position 257 with Ala, Gly, Ile, Leu, Met, Asn, Ser, Thr, or Val,
[0524] an amino acid substitution to substitute Glu at position 258 with His,
[0525] an amino acid substitution to substitute Asp at position 265 with Ala,
[0526] an amino acid substitution to substitute Asp at position 270 with Phe,
[0527] an amino acid substitution to substitute Asn at position 286 with Ala or Glu,
[0528] an amino acid substitution to substitute Thr at position 289 with His,
[0529] an amino acid substitution to substitute Asn at position 297 with Ala,
[0530] an amino acid substitution to substitute Ser at position 298 with Gly,
[0531] an amino acid substitution to substitute Val at position 303 with Ala,
[0532] an amino acid substitution to substitute Val at position 305 with Ala,
[0533] an amino acid substitution to substitute Thr at position 307 with Ala, Asp, Phe, Gly, His, Ile, Lys, Leu, Met, Asn, Pro, Gln, Arg, Ser, Val, Trp, or Tyr,
[0534] an amino acid substitution to substitute Val at position 308 with Ala, Phe, Ile, Leu, Met, Pro, Gln, or Thr,
[0535] an amino acid substitution to substitute Leu or Val at position 309 with Ala, Asp, Glu, Pro, or Arg,
[0536] an amino acid substitution to substitute Gln at position 311 with Ala, His, or Ile,
[0537] an amino acid substitution to substitute Asp at position 312 with Ala or His,
[0538] an amino acid substitution to substitute Leu at position 314 with Lys or Arg,
[0539] an amino acid substitution to substitute Asn at position 315 with Ala or His,
[0540] an amino acid substitution to substitute Lys at position 317 with Ala,
[0541] an amino acid substitution to substitute Asn at position 325 with Gly,
[0542] an amino acid substitution to substitute Ile at position 332 with Val,
[0543] an amino acid substitution to substitute Lys at position 334 with Leu,
[0544] an amino acid substitution to substitute Lys at position 360 with His,
[0545] an amino acid substitution to substitute Asp at position 376 with Ala,
[0546] an amino acid substitution to substitute Glu at position 380 with Ala,
[0547] an amino acid substitution to substitute Glu at position 382 with Ala,
[0548] an amino acid substitution to substitute Asn or Ser at position 384 with Ala,
[0549] an amino acid substitution to substitute Gly at position 385 with Asp or His,
[0550] an amino acid substitution to substitute Gln at position 386 with Pro,
[0551] an amino acid substitution to substitute Pro at position 387 with Glu,
[0552] an amino acid substitution to substitute Asn at position 389 with Ala or Ser,
[0553] an amino acid substitution to substitute Ser at position 424 with Ala,
[0554] an amino acid substitution to substitute Met at position 428 with Ala, Asp, Phe, Gly, His, Ile, Lys, Leu, Asn, Pro, Gln, Ser, Thr, Val, Trp, or Tyr,
[0555] an amino acid substitution to substitute His at position 433 with Lys,
[0556] an amino acid substitution to substitute Asn at position 434 with Ala, Phe, His, Ser, Trp, or Tyr, and
[0557] an amino acid substitution to substitute Tyr or Phe at position 436 with His (all according to the EU numbering) in an IgG antibody Fc region may be used.

[0558] From another viewpoint, an Fc region containing at least one amino acid selected from
[0559] Met as the amino acid at position 237,
[0560] Ala as the amino acid at position 238,
[0561] Lys as the amino acid at position 239,
[0562] Ile as the amino acid at position 248,
[0563] Ala, Phe, Ile, Met, Gln, Ser, Val, Trp, or Tyr as the amino acid at position 250,
[0564] Phe, Trp, or Tyr as the amino acid at position 252,
[0565] Thr as the amino acid at position 254,
[0566] Glu as the amino acid at position 255,
[0567] Asp, Glu, or Gln as the amino acid at position 256,
[0568] Ala, Gly, Ile, Leu, Met, Asn, Ser, Thr, or Val as the amino acid at position 257,
[0569] His as the amino acid at position 258,
[0570] Ala as the amino acid at position 265,
[0571] Phe as the amino acid at position 270,
[0572] Ala or Glu as the amino acid at position 286,
[0573] His as the amino acid at position 289,
[0574] Ala as the amino acid at position 297,
[0575] Gly as the amino acid at position 298,
[0576] Ala as the amino acid at position 303,
[0577] Ala as the amino acid at position 305,
[0578] Ala, Asp, Phe, Gly, His, Ile, Lys, Leu, Met, Asn, Pro, Gln, Arg, Ser, Val, Trp, or Tyr as the amino acid at position 307,
[0579] Ala, Phe, Ile, Leu, Met, Pro, Gln, or Thr as the amino acid at position 308,
[0580] Ala, Asp, Glu, Pro, or Arg as the amino acid at position 309,
[0581] Ala, His, or Ile as the amino acid at position 311,
[0582] Ala or His as the amino acid at position 312,
[0583] Lys or Arg as the amino acid at position 314,
[0584] Ala or His as the amino acid at position 315,
[0585] Ala as the amino acid at position 317,
[0586] Gly as the amino acid at position 325,
[0587] Val as the amino acid at position 332,
[0588] Leu as the amino acid at position 334,
[0589] His as the amino acid at position 360,
[0590] Ala as the amino acid at position 376,
[0591] Ala as the amino acid at position 380,
[0592] Ala as the amino acid at position 382,
[0593] Ala as the amino acid at position 384,
[0594] Asp or His as the amino acid at position 385,
[0595] Pro as the amino acid at position 386,
[0596] Glu as the amino acid at position 387,
[0597] Ala or Ser as the amino acid at position 389,
[0598] Ala as the amino acid at position 424,
[0599] Ala, Asp, Phe, Gly, His, Ile, Lys, Leu, Asn, Pro, Gln, Ser, Thr, Val, Trp, or Tyr as the amino acid at position 428,
[0600] Lys as the amino acid at position 433,
[0601] Ala, Phe, His, Ser, Trp, or Tyr as the amino acid at position 434, and
[0602] His as the amino acid at position 436
   (all according to the EU numbering) in an IgG antibody Fc region may be used.

[0603] The FcRn-binding activity possessed by the carrying moiety does not mean that the antigen-binding domain has no FcRn-binding activity. In the embodiments in which the carrying moiety has a longer half-life in blood than that of the antigen-binding domain, the antigen-binding domain may have no FcRn-binding activity, as a matter of course, or the antigen-binding domain may have FcRn-binding activity as long as the FcRn-binding activity is weaker than that of the carrying moiety.

[0604] In one embodiment, the method for extending the half-life in blood of the carrying moiety involves binding the carrying moiety to albumin. Since albumin does not undergo renal excretion and has FcRn-binding ability, its half-life in blood is as long as 17 days to 19 days (J Clin Invest. 1953 August; 32 (8): 746-768). Hence, it has been reported that a protein bound to albumin becomes bulky and capable of binding indirectly to FcRn and therefore has an increased half-life in blood (Antibodies 2015, 4 (3), 141-156).

[0605] In one embodiment, the alternative method for extending the half-life in blood of the carrying moiety involves PEGylating the carrying moiety. The PEGylation of a protein is considered to render the protein bulky and also suppress its degradation by protease in blood, thereby extending the half-life in blood of the protein (J Pharm Sci. 2008 October; 97 (10): 4167-83).

[0606] In some embodiments of the present invention, the carrying moiety contains an antibody Fc region. In a specific embodiment, the carrying moiety contains a CH2 domain and a CH3 domain of a human IgG antibody. In a specific embodiment, the carrying moiety contains a moiety extending from human IgG1 antibody heavy chain Cys226 or Pro230 to the carboxyl-terminus of the heavy chain. However, the C-terminal lysine (Lys447) or glycine-lysine (Gly446-Lys447) of the Fc region may or may not be present.

[0607] In some embodiments of the present invention, the carrying moiety contains an antibody constant region. In a more preferred embodiment, the carrying moiety contains an IgG antibody constant region. In a further preferred embodiment, the carrying moiety contains a human IgG antibody constant region.

[0608] In some embodiments of the present invention, the carrying moiety contains: a region substantially similar in structure to an antibody heavy chain constant region; and a region substantially similar in structure to an antibody light chain, connected to the region via a covalent bond such as a disulfide bond or a noncovalent bond such as a hydrogen bond or hydrophobic interaction.

[0609] In the present specification, the “polypeptide comprising an antigen-binding domain and a carrying moiety” is usually a series of polypeptides connected through an amide bond(s), or a protein containing a plurality of polypeptides connected through an amide bond(s).

[0610] In some embodiments of the present invention, the antigen-binding domain is capable of being released from the polypeptide, and the antigen-binding domain released from the polypeptide has higher antigen-binding activity. In the present specification, the term “release” refers to the mutual separation of two moieties of the polypeptide. The release of the antigen-binding domain from the polypeptide can be attributed to the cancellation of the interaction between the antigen-binding domain and the carrying moiety. The antigen-binding activity of the antigen-binding domain incorporated into the polypeptide is inhibited. Hence, the antigen-binding domain released from the polypeptide can be confirmed by measuring the antigen-binding activity of a subject and comparing it with the antigen-binding activity of the antigen-binding domain incorporated into the polypeptide.

[0611] In some embodiments, the polypeptide comprises a cleavage site, and the cleavage site is cleaved so that the antigen-binding domain is released from the polypeptide. The cleavage site can be cleaved by, for example, an enzyme, can be reduced with a reducing agent, or can be photodegraded. The cleavage site may be placed at any position in the polypeptide as long as the antigen-binding domain can be released and does not lose its antigen-binding activity after the release. The polypeptide may further contain an additional cleavage site other than the cleavage site for the release of the antigen-binding domain. In one embodiment of the present invention, the cleavage site comprises a protease cleavage sequence and can be cleaved by a protease(s).

[0612] In the present specification, the term “cleaved” refers to a state where the antigen-binding domain and the carrying moiety are separated from each other after alteration of the cleavage site by protease, reduction of a cysteine-cysteine disulfide bond at the cleavage site, and/or photoactivation. In the present specification, the term “uncleaved” refers to a state where the antigen-binding domain is linked to the carrying moiety in the absence of the protease cleavage of the cleavage site, in the absence of the reduction of a cysteine-cysteine disulfide bond at the cleavage site, and/or in the absence of light.

[0613] The cleavage of the cleavage site can be detected by subjecting a solution containing the cleavage site-containing polypeptide to SDS-PAGE (polyacrylamide gel electrophoresis) and measuring the molecular weights of the fragments or detecting change in molecular weight between before and after the cleavage.

[0614] The cleavage site can be specifically modified (cleaved, reduced or photodegraded) by an agent (i.e., protease, a reducing agent, or light) at a rate of approximately 0.001 to 1500×104 M-1S-1 or at least 0.001, 0.005, 0.01, 0.05, 0.1, 0.5, 1, 2.5, 5, 7.5, 10, 15, 20, 25, 50, 75, 100, 125, 150, 200, 250, 500, 750, 1000, 1250, or 1500×104 M-1S-1.

[0615] The specific cleavage by protease is performed by the contact between the protease and the cleavage site or a molecule containing the cleavage site. The cleavage site can be cleaved in the presence of sufficient enzyme activity. The sufficient enzyme activity can refer to the ability of the enzyme to bring about cleavage upon contact with the cleavage site.

[0616] In the present specification, the term “protease” refers to an enzyme such as endopeptidase or exopeptidase which hydrolyzes a peptide bond, typically, endopeptidase. The protease used in the present invention is limited only by being capable of cleaving the protease cleavage sequence and is not particularly limited by its type. In some embodiments, target tissue specific protease is used. The target tissue specific protease can refer to, for example, any of

(1) protease that is expressed at a higher level in the target tissue than in a normal tissue,
(2) protease that has higher activity in the target tissue than in a normal tissue,
(3) protease that is expressed at a higher level in the target cells than in a normal cell, and
(4) protease that has higher activity in the target cells than in a normal cell.

[0617] In a more specific embodiment, a cancer tissue specific protease or an inflammatory tissue specific protease is used.

[0618] In the present specification, the term “target tissue” means a tissue containing at least one target cell. In some embodiments of the present invention, the target tissue is a cancer tissue. In some embodiments of the present invention, the target tissue is an inflammatory tissue.

[0619] The term “cancer tissue” means a tissue containing at least one cancer cell. Thus, considering that, for example, the cancer tissue contains cancer cells and vascular vessels, every cell type that contributes to the formation of tumor mass containing cancer cells and endothelial cells is included in the scope of the present invention. In the present specification, the tumor mass refers to a foci of tumor tissue. The term “tumor” is generally used to mean benign neoplasm or malignant neoplasm.

[0620] In the present specification, examples of the “inflammatory tissue” include the following:

a joint tissue in rheumatoid arthritis or osteoarthritis,
a lung (alveolus) in bronchial asthma or COPD,
a digestive organ tissue in inflammatory bowel disease, Crohn disease, or ulcerative colitis,
a fibrotic tissue in fibrosis in the liver, the kidney, or the lung,
a tissue under rejection of organ transplantation,
a vascular vessel or heart (cardiac muscle) in arteriosclerosis or heart failure,
a visceral fat tissue in metabolic syndrome,
a skin tissue in atopic dermatitis and other dermatitides, and
a spinal nerve in disk herniation or chronic lumbago.

[0621] Specifically expressed or specifically activated protease, or protease considered to be related to the disease condition of a target tissue (target tissue specific protease) is known for some types of target tissues. For example, WO2013/128194, WO2010/081173, and WO2009/025846 disclose protease specifically expressed in a cancer tissue. Also, J Inflamm (Lond). 2010; 7: 45, Nat Rev Immunol. 2006 July; 6 (7): 541-50, Nat Rev Drug Discov. 2014 December; 13 (12): 904-27, Respir Res. 2016 Mar. 4; 17: 23, Dis Model Mech. 2014 February; 7 (2): 193-203, and Biochim Biophys Acta. 2012 January; 1824 (1): 133-45 disclose protease considered to be related to inflammation.

[0622] In addition to the protease specifically expressed in a target tissue, there also exists protease specifically activated in a target tissue. For example, protease may be expressed in an inactive form and then converted to an active form. Many tissues contain a substance inhibiting active protease and control the activity by the process of activation and the presence of the inhibitor (Nat Rev Cancer. 2003 July; 3 (7): 489-501). In a target tissue, the active protease may be specifically activated by escaping inhibition.

[0623] The active protease can be measured by use of a method using an antibody recognizing the active protease (PNAS 2013 Jan. 2; 110 (1): 93-98) or a method of fluorescently labeling a peptide recognizable by protease so that the fluorescence is quenched before cleavage, but emitted after Cleavage (Nat Rev Drug Discov. 2010 September; 9 (9): 690-701. doi: 10.1038/nrd3053).

[0624] From one viewpoint, the term “target tissue specific protease” can refer to any of

[0625] (i) protease that is expressed at a higher level in the target tissue than in a normal tissue,

[0626] (ii) protease that has higher activity in the target tissue than in a normal tissues,

[0627] (iii) protease that is expressed at a higher level in the target cell than in a normal cell, and

[0628] (iv) protease that has higher activity in the target cell than in a normal cell.

[0629] Specific examples of the protease include, but are not limited to, cysteine protease (including cathepsin families B, L, S, etc.), aspartyl protease (cathepsins D, E, K, 0, etc.), serine protease (including matriptase (including MT-SP1), cathepsins A and G, thrombin, plasmin, urokinase (uPA), tissue plasminogen activator (tPA), elastase, proteinase 3, thrombin, kallikrein, tryptase, and chymase), metalloproteinases (metalloproteinases (MMP 1-28) including both membrane-bound forms (MMP 14-17 and MMP 24-25) and secreted forms (MMP 1-13, MMP 18-23 and MMP 26-28), A disintegrin and metalloproteinases (ADAMs), A disintegrin and metalloproteinase with thrombospondin motifs (ADAMTS), meprin (meprin alpha and meprin beta), CD10 (CALLA), prostate-specific antigen (PSA), legumain, TMPRSS3, TMPRSS4, neutrophil elastase (HNE), beta secretase (BACE), fibroblast activation protein alpha (FAP), granzyme B, guanidinobenzoatase (GB), hepsin, neprilysin, NS3/4A, HCV-NS3/4, calpain, ADAMDEC1, renin, cathepsin C, cathepsin V/L2, cathepsin X/Z/P, cruzipain, otubain 2, kallikrein-related peptidases (KLKs (KLK3, KLK4, KLK5, KLK6, KLK7, KLK8, KLK10, KLK11, KLK13, and KLK14)), bone morphogenetic protein 1 (BMP-1), activated protein C, blood coagulation-related proteases (Factor VIIa, Factor IXa, Factor Xa, Factor XIa, and Factor XIIa), HtrA1, lactoferrin, marapsin, PACE4, DESC1, dipeptidyl peptidase 4 (DPP-4), TMPRSS2, cathepsin F, cathepsin H, cathepsin L2, cathepsin O, cathepsin S, granzyme A, Gepsin calpain 2, glutamate carboxypeptidase 2, AMSH-like proteases, AMSH, gamma secretase, antiplasmin cleaving enzyme (APCE), decysin 1, N-acetylated alpha-linked acidic dipeptidase-like 1 (NAALADL1), and furin.

[0630] From another viewpoint, the target tissue specific protease can refer to a cancer tissue specific protease or an inflammatory tissue specific protease.

[0631] Examples of cancer tissue specific protease include protease specifically expressed in a cancer tissue disclosed in WO2013/128194, WO2010/081173, and WO2009/025846.

[0632] As for the type of cancer tissue specific protease, the protease having higher expression specificity in the cancer tissue to be treated is more effective for reducing side effects. Preferable cancer tissue specific protease has a concentration in the cancer tissue 5 times or higher, more preferably 10 times or higher, further preferably 100 times or higher, particularly preferably 500 times or higher, most preferably 1000 times or higher than its concentration in a normal tissue. Also, preferable cancer tissue specific protease has activity in the cancer tissue twice or higher, more preferably 3 times or higher, 4 times or higher, 5 times or higher, or 10 times or higher, further preferably 100 times or higher, particularly preferably 500 times or higher, and most preferably 1000 times or higher than its activity in a normal tissue.

[0633] The cancer tissue specific protease may be in a form bound with a cancer cell membrane or may be in a form secreted extracellularly without being bound with a cell membrane. When the cancer tissue specific protease is not bound with a cancer cell membrane, it is preferred for immunocyte-mediated cytotoxicity to be specific for cancer cells that the cancer tissue specific protease should exist within or in the vicinity of the cancer tissue. In the present specification, the “vicinity of the cancer tissue” means to fall within the scope of location where the protease cleavage sequence specific for the cancer tissue is cleaved so that the antigen-binding domain exerts antigen-binding activity. However, it is preferred that damage on normal cells should be minimized in this scope of location.

[0634] From an alternative viewpoint, cancer tissue specific protease is any of

(i) protease that is expressed at a higher level in the cancer tissue than in a normal tissue,
(ii) protease that has higher activity in the cancer tissue than in a normal tissue,
(iii) protease that is expressed at a higher level in the cancer cell than in a normal cell, and
(iv) protease that has higher activity in the cancer cell than in a normal cell.

[0635] One type of cancer tissue specific protease may be used alone, or two or more types of cancer tissue specific proteases may be combined. The number of types of cancer tissue specific protease can be appropriately set by those skilled in the art in consideration of the cancer type to be treated.

[0636] From these viewpoints, cancer tissue specific protease is preferably serine proteases or metalloproteinases, more preferably matriptases (including MT-SP1), urokinase (uPA), or metalloproteinases, and further preferably MT-SP1, uPA, MMP-2, or MMP-9, among the proteases listed above.

[0637] As for the type of inflammatory tissue specific protease, the protease having higher expression specificity in the inflammatory tissue to be treated is more effective for reducing side effects. Preferable inflammatory tissue specific protease has a concentration in the inflammatory tissue a 5 times or higher, more preferably 10 times or higher, further preferably 100 times or higher, particularly preferably 500 times or higher, and most preferably 1000 times or higher than its concentration in normal tissues. Also, preferable inflammatory tissue specific protease has activity in the inflammatory tissues at least 2 times, more preferably 3 times or higher, 4 times or higher, 5 times or higher, or 10 times or higher, further preferably 100 times or higher, particularly preferably 500 times or higher, and most preferably 1000 times or higher than its activity in a normal tissue.

[0638] The inflammatory tissue specific protease may be in a form bound with an inflammatory cell membrane or may be in a form secreted extracellularly without being bound with a cell membrane. When the inflammatory tissue specific protease is not bound with an inflammatory cell membrane, it is preferred for immunocyte-mediated cytotoxicity to be specific for inflammatory cells that the inflammatory tissue specific protease should exist within or in the vicinity of the inflammatory tissue. In the present specification, the “vicinity of the inflammatory tissue” means to fall within the scope of location where the protease cleavage sequence specific for the inflammatory tissue is cleaved so that the antigen-binding domain exerts antigen-binding activity. However, it is preferred that damage on normal cells should be minimized in this scope of location.

[0639] From an alternative viewpoint, inflammatory tissue specific protease is any of
[0640] (i) protease that is expressed at a higher level in the inflammatory tissue than in a normal tissue,
[0641] (ii) protease that has higher activity in the inflammatory tissue than in a normal tissue,
[0642] (iii) protease that is expressed at a higher level in the inflammatory cell than in a normal cell, and
[0643] (iv) protease that has higher activity in the inflammatory cell than in a normal cell.

[0644] One type of inflammatory tissue specific protease may be used alone, or two or more types of inflammatory tissue specific proteases may be combined. The number of types of inflammatory tissue specific protease can be appropriately set by those skilled in the art in consideration of the pathological condition to be treated.

[0645] From these viewpoints, t inflammatory tissue specific protease is preferably metalloproteinase among the proteases listed above. The metalloproteinase is more preferably ADAMTS5, MMP-2, MMP-7, MMP-9, or MMP-13.

[0646] The protease cleavage sequence is a particular amino acid sequence that is specifically recognized by target tissue specific protease when the polypeptide is hydrolyzed by the target tissue specific protease in an aqueous solution.

[0647] The protease cleavage sequence is preferably an amino acid sequence that is hydrolyzed with high specificity by target tissue specific protease more specifically expressed in the target tissue or cells to be treated or more specifically activated in the target tissue/cells to be treated, from the viewpoint of reduction in side effects.

[0648] Specific examples of the protease cleavage sequence include target sequences that are specifically hydrolyzed by the above-listed protease specifically expressed in a cancer tissue disclosed in WO2013/128194, WO2010/081173, and WO2009/025846, the protease specific for an inflammatory tissue, and the like. A sequence artificially altered by, for example, introducing an appropriate amino acid mutation to a target sequence that is specifically hydrolyzed by known protease can also be used. Alternatively, a protease cleavage sequence identified by a method known to those skilled in the art as described in Nature Biotechnology 19, 661-667 (2001) may be used.

[0649] Furthermore, a naturally occurring protease cleavage sequence may be used. For example, TGFβ is converted to a latent form by protease cleavage. Likewise, a protease cleavage sequence in a protein that changes its molecular form by protease cleavage can also be used.

[0650] Examples of the protease cleavage sequence that can be used include, but are not limited to, sequences disclosed in WO2015/116933, WO2015/048329, WO2016/118629, WO2016/179257, WO2016/179285, WO2016/179335, WO2016/179003, WO2016/046778, WO2016/014974, U.S. Patent Publication No. US2016/0289324, U.S. Patent Publication No. US2016/0311903, PNAS (2000) 97: 7754-7759, Biochemical Journal (2010) 426: 219-228, and Beilstein J Nanotechnol. (2016) 7: 364-373.

[0651] The protease cleavage sequence is more preferably an amino acid sequence that is specifically hydrolyzed by suitable target tissue specific protease as mentioned above. The amino acid sequence that is specifically hydrolyzed by target tissue specific protease is preferably a sequence comprising any of the following amino acid sequences:

LSGRSDNH, (SEQ ID NO: 12, cleavable by MT-SP1
or uPA)
PLALAG, (SEQ ID NO: 25, cleavable by MMP-2 or
MMP-9)
and
VPLSLTMG. (SEQ ID NO: 26, cleavable by MMP-7)

[0652] Any of the following sequences can also be used as the protease cleavage sequence:

TSTSGRSANPRG, (SEQ ID NO: 74, cleavable by MT-SP1 or uPA)
ISSGLLSGRSDNH, (SEQ ID NO: 75, cleavable by MT-SP1 or uPA)
AVGLLAPPGGLSGRSDNH, (SEQ ID NO: 76, cleavable by MT-SP1 or uPA)
GAGVPMSMRGGAG, (SEQ ID NO: 77, cleavable by MMP1)
GAGIPVSLRSGAG, (SEQ ID NO: 78, cleavable by MMP2)
GPLGIAGQ, (SEQ ID NO: 79, cleavable by MMP-2)
GGPLGMLSQS, (SEQ ID NO: 80, cleavable by MMP-2)
PLGLWA, (SEQ ID NO: 81, cleavable by MMP-2)
GAGRPFSMIMGAG, (SEQ ID NO: 82, cleavable by MMP-3)
GAGVPLSLTMGAG, (SEQ ID NO: 83, cleavable by MMP-7)
GAGVPLSLYSGAG, (SEQ ID NO: 84, cleavable by MMP-9)
AANLRN, (SEQ ID NO: 85, cleavable by MMP-11)
AQAYVK, (SEQ ID NO: 86, cleavable by MMP-11)
AANYMR, (SEQ ID NO: 87, cleavable by MMP-11)
AAALTR, (SEQ ID NO: 88, cleavable by MMP-11)
AQNLMR, (SEQ ID NO: 89, cleavable by MMP-11)
AANYTK, (SEQ ID NO: 90, cleavable by MMP-11)
GAGPQGLAGQRGIVAG, (SEQ ID NO: 91, cleavable by MMP-13)
PRFKIIGG, (SEQ ID NO: 92, cleavable by pro-urokinase)
PRFRIIGG, (SEQ ID NO: 93, cleavable by pro-urokinase)
GAGSGRSAG, (SEQ ID NO: 94, cleavable by uPA)
SGRSA, (SEQ ID NO: 95, cleavable by uPA)
GSGRSA, (SEQ ID NO: 96, cleavable by uPA)
SGKSA, (SEQ ID NO: 97, cleavable by uPA)
SGRSS, (SEQ ID NO: 98, cleavable by uPA)
SGRRA, (SEQ ID NO: 99, cleavable by uPA)
SGRNA, (SEQ ID NO: 100, cleavable by uPA)
SGRKA, (SEQ ID NO: 101, cleavable by uPA)
QRGRSA, (SEQ ID NO: 102, cleavable by tPA)
GAGSLLKSRMVPNFNAG, (SEQ ID NO: 103, cleavable by cathepsin B)
TQGAAA, (SEQ ID NO: 104, cleavable by cathepsin B)
GAAAAA, (SEQ ID NO: 105, cleavable by cathepsin B)
GAGAAG, (SEQ ID NO: 106, cleavable by cathepsin B)
AAAAAG, (SEQ ID NO: 107, cleavable by cathepsin B)
LCGAAI, (SEQ ID NO: 108, cleavable by cathepsin B)
FAQALG, (SEQ ID NO: 109, cleavable by cathepsin B)
LLQANP, (SEQ ID NO: 110, cleavable by cathepsin B)
LAAANP, (SEQ ID NO: 111, cleavable by cathepsin B)
LYGAQF, (SEQ ID NO: 112, cleavable by cathepsin B)
LSQAQG, (SEQ ID NO: 113, cleavable by cathepsin B)
ASAASG, (SEQ ID NO: 114, cleavable by cathepsin B)
FLGASL, (SEQ ID NO: 115, cleavable by cathepsin B)
AYGATG, (SEQ ID NO: 116, cleavable by cathepsin B)
LAQATG, (SEQ ID NO: 117, cleavable by cathepsin B)
GAGSGVVIATVIVITAG, (SEQ ID NO: 118, cleavable by cathepsin L)
APMAEGGG, (SEQ ID NO: 119, cleavable by meprin alpha or meprin beta)
EAQGDKII, (SEQ ID NO: 120, cleavable by meprin alpha or meprin beta)
LAFSDAGP, (SEQ ID NO: 121, cleavable by meprin alpha or meprin beta)
YVADAPK, (SEQ ID NO: 122, cleavable by meprin alpha or meprin beta)
RRRRR, (SEQ ID NO: 123, cleavable by furin)
RRRRRR, (SEQ ID NO: 124, cleavable by furin)
GQSSRHRRAL, (SEQ ID NO: 125, cleavable by furin)
SSRHRRALD, (SEQ ID NO: 126)
RKSSIIIRMRDVVL, (SEQ ID NO: 127, cleavable by plasminogen)
SSSFDKGKYKKGDDA, (SEQ ID NO: 128, cleavable by staphylokinase)
SSSFDKGKYKRGDDA, (SEQ ID NO: 129, cleavable by staphylokinase)
IEGR, (SEQ ID NO: 130, cleavable by Factor Xa)
IDGR, (SEQ ID NO: 131, cleavable by Factor Xa)
GGSIDGR, (SEQ ID NO: 132, cleavable by Factor Xa)
GPQGIAGQ, (SEQ ID NO: 133, cleavable by collagenase)
GPQGLLGA, (SEQ ID NO: 134, cleavable by collagenase)
GIAGQ, (SEQ ID NO: 135, cleavable by collagenase)
GPLGIAG, (SEQ ID NO: 136, cleavable by collagenase)
GPEGLRVG, (SEQ ID NO: 137, cleavable by collagenase)
YGAGLGVV, (SEQ ID NO: 138, cleavable by collagenase)
AGLGVVER, (SEQ ID NO: 139, cleavable by collagenase)
AGLGISST, (SEQ ID NO: 140, cleavable by collagenase)
EPQALAMS, (SEQ ID NO: 141, cleavable by collagenase)
QALAMSAI, (SEQ ID NO: 142, cleavable by collagenase)
AAYHLVSQ, (SEQ ID NO: 143, cleavable by collagenase)
MDAFLESS, (SEQ ID NO: 144, cleavable by collagenase)
ESLPVVAV, (SEQ ID NO: 145, cleavable by collagenase)
SAPAVESE, (SEQ ID NO: 146, cleavable by collagenase)
DVAQFVLT, (SEQ ID NO: 147, cleavable by collagenase)
VAQFVLTE, (SEQ ID NO: 148, cleavable by collagenase)
AQFVLTEG, (SEQ ID NO: 149, cleavable by collagenase)
PVQPIGPQ, (SEQ ID NO: 150, cleavable by collagenase)
LVPRGS, (SEQ ID NO: 151, cleavable by thrombin)
TSGSGRSANARG, (SEQ ID NO: 168, cleavable by uPA and MT-SP1)
TSQSGRSANQRG, (SEQ ID NO: 169, cleavable by uPA and MT-SP1)
TSPSGRSAYPRG, (SEQ ID NO: 170, cleavable by uPA and MT-SP1)
TSGSGRSATPRG, (SEQ ID NO: 171, cleavable by uPA and MT-SP1)
TSQSGRSATPRG, (SEQ ID NO: 172, cleavable by uPA and MT-SP1)
TSASGRSATPRG, (SEQ ID NO: 173, cleavable by uPA and MT-SP1)
TSYSGRSAVPRG, (SEQ ID NO: 174, cleavable by uPA and MT-SP1)
TSYSGRSANFRG, (SEQ ID NO: 175, cleavable by uPA and MT-SP1)
TSSSGRSATPRG, (SEQ ID NO: 176, cleavable by uPA and MT-SP1)
TSTTGRSASPRG, (SEQ ID NO: 177, cleavable by uPA and MT-SP1)
and
TSTSGRSANPRG. (SEQ ID NO: 178, cleavable by uPA and MT-SP1)

[0653] The sequences shown in Table 1 may also be used as protease cleavage sequences.

TABLE 1
Protease Cleavage Sequences
(cleavable by uPA and MT-SP1)

| SEQ | | SEQ | |
|---|---|---|---|
| ID | Cleavage | ID | Cleavage |
| NO | sequence | NO | sequence |
| 208 | TSASGRSANPRG | 507 | ASGRSANP |
| 209 | TSESGRSANPRG | 508 | ESGRSANP |
| 210 | TSFSGRSANPRG | 509 | FSGRSANP |
| 211 | TSGSGRSANPRG | 510 | GSGRSANP |
| 212 | TSHSGRSANPRG | 511 | HSGRSANP |
| 213 | TSKSGRSANPRG | 512 | KSGRSANP |
| 214 | TSMSGRSANPRG | 513 | MSGRSANP |
| 215 | TSNSGRSANPRG | 514 | NSGRSANP |
| 216 | TSPSGRSANPRG | 515 | PSGRSANP |
| 217 | TSQSGRSANPRG | 516 | QSGRSANP |
| 218 | TSWSGRSANPRG | 517 | WSGRSANP |
| 219 | TSYSGRSANPRG | 518 | YSGRSANP |
| 220 | TSTAGRSANPRG | 519 | TAGRSANP |
| 221 | TSTDGRSANPRG | 520 | TDGRSANP |
| 222 | TSTEGRSANPRG | 521 | TEGRSANP |
| 223 | TSTFGRSANPRG | 522 | TFGRSANP |
| 224 | TSTLGRSANPRG | 523 | TLGRSANP |
| 225 | TSTMGRSANPRG | 524 | TMGRSANP |
| 226 | TSTPGRSANPRG | 525 | TPGRSANP |
| 227 | TSTQGRSANPRG | 526 | TQGRSANP |
| 228 | TSTVGRSANPRG | 527 | TVGRSANP |
| 229 | TSTWGRSANPRG | 528 | TWGRSANP |
| 230 | TSTSARSANPRG | 529 | TSARSANP |
| 231 | TSTSERSANPRG | 530 | TSERSANP |
| 232 | TSTSFRSANPRG | 531 | TSFRSANP |
| 233 | TSTSHRSANPRG | 532 | TSHRSANP |
| 234 | TSTSIRSANPRG | 533 | TSIRSANP |
| 235 | TSTSKRSANPRG | 534 | TSKRSANP |
| 236 | TSTSLRSANPRG | 535 | TSLRSANP |
| 237 | TSTSMRSANPRG | 536 | TSMRSANP |
| 238 | TSTSNRSANPRG | 537 | TSNRSANP |
| 239 | TSTSPRSANPRG | 538 | TSPRSANP |
| 240 | TSTSQRSANPRG | 539 | TSQRSANP |
| 241 | TSTSRRSANPRG | 540 | TSRRSANP |
| 242 | TSTSTRSANPRG | 541 | TSTRSANP |
| 243 | TSTSVRSANPRG | 542 | TSVRSANP |
| 244 | TSTSWRSANPRG | 543 | TSWRSANP |
| 245 | TSTSYRSANPRG | 544 | TSYRSANP |
| 246 | TSTSGRAANPRG | 545 | TSGRAANP |
| 247 | TSTSGRDANPRG | 546 | TSGRDANP |
| 248 | TSTSGREANPRG | 547 | TSGREANP |
| 249 | TSTSGRGANPRG | 548 | TSGRGANP |
| 250 | TSTSGRHANPRG | 549 | TSGRHANP |
| 251 | TSTSGRIANPRG | 550 | TSGRIANP |
| 252 | TSTSGRKANPRG | 551 | TSGRKANP |
| 253 | TSTSGRLANPRG | 552 | TSGRLANP |
| 254 | TSTSGRMANPRG | 553 | TSGRMANP |
| 255 | TSTSGRNANPRG | 554 | TSGRNANP |
| 256 | TSTSGRPANPRG | 555 | TSGRPANP |
| 257 | TSTSGRQANPRG | 556 | TSGRQANP |
| 258 | TSTSGRRANPRG | 557 | TSGRRANP |
| 259 | TSTSGRTANPRG | 558 | TSGRTANP |
| 260 | TSTSGRVANPRG | 559 | TSGRVANP |
| 261 | TSTSGRWANPRG | 560 | TSGRWANP |
| 2b2 | ISTSGRYANPRG | 5b1 | TSGHYANP |
| 263 | TSTSGRSENPRG | 562 | TSGRSENP |
| 264 | TSTSGRSFNPRG | 563 | TSGRSFNP |
| 265 | TSTSGRSKNPRG | 564 | TSGRSKNP |
| 266 | TSTSGRSMNPRG | 565 | TSGRSMNP |
| 267 | TSTSGRSNNPRG | 566 | TSGRSNNP |
| 268 | TSTSGRSPNPRG | 567 | TSGRSPNP |
| 269 | TSTSGRSQNPRG | 568 | TSGRSQNP |
| 270 | TSTSGRSRNPRG | 569 | TSGRSRNP |
| 271 | TSTSGRSSNPRG | 570 | TSGRSSNP |
| 272 | TSTSGRSWNPRG | 571 | TSGRSWNP |
| 273 | TSTSGRSYNPRG | 572 | TSGRSYNP |
| 274 | TSTSGRSAAPRG | 573 | TSGRSAAP |
| 275 | TSTSGRSADPRG | 574 | TSGRSADP |
| 276 | TSTSGRSAEPRG | 575 | TSGRSAEP |
| 277 | TSTSGRSAFPRG | 576 | TSGRSAFP |
| 278 | TSTSGRSAGPRG | 577 | TSGRSAGP |
| 279 | TSTSGRSAKPRG | 578 | TSGRSAKP |
| 280 | TSTSGRSALPRG | 579 | TSGRSALP |
| 281 | TSTSGRSAMPRG | 580 | TSGRSAMP |
| 282 | TSTSGRSAPPRG | 581 | TSGRSAPP |
| 283 | TSTSGRSAQPRG | 582 | TSGRSAQP |
| 284 | TSTSGRSAVPRG | 583 | TSGRSAVP |
| 285 | TSTSGRSAWPRG | 584 | TSGRSAWP |
| 286 | TSTSGRSAYPRG | 585 | TSGRSAYP |
| 287 | TSTSGRSANARG | 586 | TSGRSANA |
| 288 | TSTSGRSANDRG | 587 | TSGRSAND |
| 289 | TSTSGRSANERG | 588 | TSGRSANE |
| 290 | TSTSGRSANFRG | 589 | TSGRSANF |
| 291 | TSTSGRSANGRG | 590 | TSGRSANG |
| 292 | TSTSGRSANIRG | 591 | TSGRSANI |
| 293 | TSTSGRSANKRG | 592 | TSGRSANK |
| 294 | TSTSGRSANNRG | 593 | TSGRSANN |
| 295 | TSTSGRSANQRG | 594 | TSGRSANQ |
| 296 | TSTSGRSANSRG | 595 | TSGRSANS |
| 297 | TSTSGRSANTRG | 596 | TSGRSANT |
| 298 | TSTSGRSANWRG | 597 | TSGRSANW |
| 299 | TSDSGRSANPRG | 598 | DSGRSANP |
| 300 | TSISGRSANPRG | 599 | ISGRSANP |
| 301 | TSSSGRSANPRG | 600 | SSGRSANP |
| 302 | TSTHGRSANPRG | 601 | THGRSANP |
| 303 | TSTKGRSANPRG | 602 | TKGRSANP |
| 304 | TSTTGRSANPRG | 603 | TTGRSANP |
| 305 | TSTYGRSANPRG | 604 | TYGRSANP |
| 306 | TSTSDRSANPRG | 605 | TSDRSANP |
| 307 | TSTSSRSANPRG | 606 | TSSRSANP |
| 308 | TSTSGRFANPRG | 607 | TSGRFANP |
| 309 | TSTSGRSDNPRG | 608 | TSGRSDNP |
| 310 | TSTSGRSHNPRG | 609 | TSGRSHNP |
| 311 | TSTSGRSINPRG | 610 | TSGRSINP |
| 312 | TSTSGRSLNPRG | 611 | TSGRSLNP |
| 313 | TSTSGRSTNPRG | 612 | TSGRSTNP |
| 314 | TSTSGRSVNPRG | 613 | TSGRSVNP |
| 315 | TSTSGRSAHPRG | 614 | TSGRSAHP |
| 316 | TSTSGRSAIPRG | 615 | TSGRSAIP |
| 317 | TSTSGRSARPRG | 616 | TSGRSARP |
| 318 | TSTSGRSASPRG | 617 | TSGRSASP |
| 319 | TSTSGRSATPRG | 618 | TSGRSATP |
| 320 | TSTSGRSANHRG | 619 | TSGRSANH |
| 321 | TSTSGRSANLRG | 620 | TSGRSANL |
| 322 | TSTSGRSANMRG | 621 | TSGRSANM |
| 323 | TSTSGRSANRRG | 622 | TSGRSANR |
| 324 | TSTSGRSANVRG | 623 | TSGRSANV |
| 325 | TSTSGRSANYRG | 624 | TSGRSANY |
| 326 | TSGSGRSAVPRG | 625 | GSGRSAVP |
| 327 | TSGSGRSAYPRG | 626 | GSGRSAYP |
| 328 | TSGSGRSANQRG | 627 | GSGRSANQ |
| 168 | TSGSGRSANARG | 628 | GSGRSANA |
| 329 | TSGSGRSANIRG | 629 | GSGRSANI |
| 330 | TSGSGRSANFRG | 630 | GSGRSANF |
| 331 | TSGSGRSANSRG | 631 | GSGRSANS |
| 332 | TSQSGRSAVPRG | 632 | QSGRSAVP |
| 333 | TSQSGRSAYPRG | 633 | QSGRSAYP |
| 169 | TSQSGRSANQRG | 634 | QSGRSANQ |
| 334 | TSQSGRSANARG | 635 | QSGRSANA |
| 335 | TSQSGRSANIRG | 636 | QSGRSANI |
| 336 | TSQSGRSANFRG | 637 | QSGRSANF |
| 337 | TSQSGRSANSRG | 638 | QSGRSANS |
| 338 | TSPSGRSAVPRG | 639 | PSGRSAVP |
| 170 | TSPSGRSAYPRG | 640 | PSGRSAYP |
| 339 | TSPSGRSANQRG | 641 | PSGRSANQ |
| 340 | TSPSGRSANARG | 642 | PSGRSANA |
| 341 | TSPSGRSANIRG | 643 | PSGRSANI |
| 342 | TSPSGRSANFRG | 644 | PSGRSANF |
| 343 | TSPSGRSANSRG | 645 | PSGRSANS |
| 344 | TSASGRSAVPRG | 646 | ASGRSAVP |
| 345 | TSASGRSAYPRG | 647 | ASGRSAYP |
| 346 | TSASGRSANQRG | 648 | ASGRSANQ |
| 347 | TSASGRSANARG | 649 | ASGRSANA |
| 348 | TSASGRSANIRG | 650 | ASGRSANI |
| 349 | TSASGRSANFRG | 651 | ASGRSANF |
| 350 | TSASGRSANSRG | 652 | ASGRSANS |
| 351 | TSYSGRSENPRG | 653 | YSGRSENP |
| 352 | TSGSGRSENPRG | 654 | GSGRSENP |
| 353 | TSQSGRSENPRG | 655 | QSGRSENP |
| 354 | TSPSGRSENPRG | 656 | PSGRSENP |
| 355 | TSASGRSENPRG | 657 | ASGRSENP |
| 356 | TSHSGRSENPRG | 658 | HSGRSENP |
| 357 | TSTSGRSENQRG | 659 | TSGRSENQ |
| 358 | TSTSGRSENARG | 660 | TSGRSENA |
| 359 | TSTSGRSENIRG | 661 | TSGRSEN1 |
| 360 | TSTSGRSENFRG | 662 | TSGRSENF |
| 361 | TSTSGRSENSRG | 663 | TSGRSENS |
| 362 | TSYSGRSAEPRG | 664 | YSGRSAEP |
| 363 | TSGSGRSAEPRG | 665 | GSGRSAEP |
| 364 | TSQSGRSAEPRG | 666 | QSGRSAEP |
| 365 | TSPSGRSAEPRG | 667 | PSGRSAEP |
| 366 | TSASGRSAEPRG | 668 | ASGRSAEP |
| 367 | TSHSGRSAEPRG | 669 | HSGRSAEP |
| 368 | TSTSGRSAEQRG | 670 | TSGRSAEQ |
| 369 | TSTSGRSAEARG | 671 | TSGRSAEA |
| 370 | TSTSGRSAEIRG | 672 | TSGRSAEI |
| 371 | TSTSGRSAEFRG | 673 | TSGRSAEF |
| 372 | TSTSGRSAESRG | 674 | TSGRSAES |
| 373 | TSGTGRSANPRG | 675 | GTGRSANP |
| 374 | TSGKGRSANPRG | 676 | GKGRSANP |
| 375 | TSGSGRSAIPRG | 677 | GSGRSAIP |
| 171 | TSGSGRSATPRG | 678 | GSGRSATP |
| 376 | TSGSGRSASPRG | 679 | GSGRSASP |
| 377 | TSGSGRSAHPRG | 680 | GSGRSAHP |
| 378 | TSGSGRSANYRG | 681 | GSGRSANY |
| 379 | TSGSGRSANVRG | 682 | GSGRSANV |
| 380 | TSGSGRSANHRG | 683 | GSGRSANH |
| 381 | TSQTGRSANPRG | 684 | QTGRSANP |
| 382 | TSQKGRSANPRG | 685 | QKGRSANP |
| 383 | TSQSGRSAIPRG | 686 | QSGRSAIP |
| 172 | TSQSGRSATPRG | 687 | QSGRSATP |
| 384 | TSQSGRSASPRG | 688 | QSGRSASP |
| 385 | TSQSGRSAHPRG | 689 | QSGRSAHP |
| 386 | TSQSGRSANYRG | 690 | QSGRSANY |
| 387 | TSQSGRSANVRG | 691 | QSGRSANV |
| 388 | TSQSGRSANHRG | 692 | QSGRSANH |
| 389 | TSPTGRSANPRG | 693 | PTGRSANP |
| 390 | TSPKGRSANPRG | 694 | PKGRSANP |
| 391 | TSPSGRSAIPRG | 695 | PSGRSAIP |
| 392 | TSPSGRSATPRG | 696 | PSGRSATP |
| 393 | TSPSGRSASPRG | 697 | PSGRSASP |
| 394 | TSPSGRSAHPRG | 698 | PSGRSAHP |
| 395 | TSPSGRSANYRG | 699 | PSGRSANY |
| 396 | TSPSGRSANVRG | 700 | PSGRSANV |
| 397 | TSPSGRSANHRG | 701 | PSGRSANH |
| 398 | TSATGRSANPRG | 702 | ATGRSANP |
| 399 | TSAKGRSANPRG | 703 | AKGRSANP |
| 400 | TSASGRSAIPRG | 704 | ASGRSAIP |
| 173 | TSASGRSATPRG | 705 | ASGRSATP |
| 401 | TSASGRSASPRG | 706 | ASGRSASP |
| 402 | TSASGRSAHPRG | 707 | ASGRSAHP |
| 403 | TSASGRSANYRG | 708 | ASGRSANY |
| 404 | TSASGRSANVRG | 709 | ASGRSANV |
| 405 | TSASGRSANHRG | 710 | ASGRSANH |
| 406 | TSYTGRSANPRG | 711 | YTGRSANP |
| 407 | TSYKGRSANPRG | 712 | YKGRSANP |
| 174 | TSYSGRSAVPRG | 713 | YSGRSAVP |
| 408 | TSYSGRSAIPRG | 714 | YSGRSAIP |
| 409 | TSYSGRSATPRG | 715 | YSGRSATP |
| 410 | TSYSGRSASPRG | 716 | YSGRSASP |
| 411 | TSYSGRSAHPRG | 717 | YSGRSAHP |
| 412 | TSYSGRSANARG | 718 | YSGRSANA |
| 175 | TSYSGRSANFRG | 719 | YSGRSANF |
| 413 | TSYSGRSANYRG | 720 | YSGRSANY |
| 414 | TSYSGRSANVRG | 721 | YSGRSANV |
| 415 | TSYSGRSANHRG | 722 | YSGRSANH |
| 416 | TSSTGRSANPRG | 723 | STGRSANP |
| 417 | TSSKGRSANPRG | 724 | SKGRSANP |
| 418 | TSSSGRSAVPRG | 725 | SSGRSAVP |
| 419 | TSSSGRSAIPRG | 726 | SSGRSAIP |
| 176 | TSSSGRSATPRG | 727 | SSGRSATP |
| 420 | TSSSGRSASPRG | 728 | SSGRSASP |
| 421 | TSSSGRSAHPRG | 729 | SSGRSAHP |
| 422 | TSSSGRSANARG | 730 | SSGRSANA |
| 423 | TSSSGRSANFRG | 731 | SSGRSANF |
| 424 | TSSSGRSANYRG | 732 | SSGRSANY |
| 425 | TSSSGRSANVRG | 733 | SSGRSANV |
| 426 | TSSSGRSANHRG | 734 | SSGRSANH |
| 427 | TSITGRSANPRG | 735 | ITGRSANP |
| 428 | TSIKGRSANPRG | 736 | IKGRSANP |
| 429 | TSISGRSAVPRG | 737 | ISGRSAVP |
| 430 | TSISGRSAIPRG | 738 | ISGRSAIP |
| 431 | TSISGRSATPRG | 739 | ISGRSATP |
| 432 | TSISGRSASPRG | 740 | ISGRSASP |
| 433 | TSISGRSAHPRG | 741 | ISGRSAHP |
| 434 | TSISGRSANARG | 742 | ISGRSANA |
| 435 | TSISGRSANFRG | 743 | ISGRSANF |
| 436 | TSISGRSANYRG | 744 | ISGRSANY |
| 437 | TSISGRSANVRG | 745 | ISGRSANV |
| 438 | TSISGRSANHRG | 746 | ISGRSANH |
| 439 | TSTTGRSAVPRG | 747 | TTGRSAVP |
| 440 | TSTTGRSAIPRG | 748 | TTGRSAIP |
| 441 | TSTTGRSATPRG | 749 | TTGRSATP |
| 177 | TSTTGRSASPRG | 750 | TTGRSASP |
| 442 | TSTTGRSAHPRG | 751 | TTGRSAHP |
| 443 | TSTTGRSANARG | 752 | TTGRSANA |
| 444 | TSTTGRSANFRG | 753 | TTGRSANF |
| 445 | TSTTGRSANYRG | 754 | TTGRSANY |
| 446 | TSTTGRSANVRG | 755 | TTGRSANV |
| 447 | TSTTGRSANHRG | 756 | TTGRSANH |
| 448 | TSTKGRSAVPRG | 757 | TKGRSAVP |
| 449 | TSTKGRSAIPRG | 758 | TKGRSAIP |
| 450 | TSTKGRSATPRG | 759 | TKGRSATP |
| 451 | TSTKGRSASPRG | 760 | TKGRSASP |
| 452 | TSTKGRSAHPRG | 761 | TKGRSAHP |
| 453 | TSTKGRSANARG | 762 | TKGRSANA |
| 454 | TSTKGRSANFRG | 763 | TKGRSANF |
| 455 | TSTKGRSANYRG | 764 | TKGRSANY |
| 456 | TSTKGRSANVRG | 765 | TKGRSANV |
| 457 | TSTKGRSANHRG | 766 | TKGRSANH |
| 458 | TSTSGRSAVYRG | 767 | TSGRSAVY |
| 459 | TSTSGRSAVVRG | 768 | TSGRSAVV |
| 460 | TSTSGRSAVHRG | 769 | TSGRSAVH |
| 461 | TSTSGRSAIYRG | 770 | TSGRSAIY |
| 462 | TSTSGRSAIVRG | 771 | TSGRSAIV |
| 463 | TSTSGRSAIHRG | 772 | TSGRSAIH |
| 464 | TSTSGRSASYRG | 773 | TSGRSASY |
| 465 | TSTSGRSASVRG | 774 | TSGRSASV |
| 466 | TSTSGRSASHRG | 775 | TSGRSASH |
| 467 | TSTSGRSAHYRG | 776 | TSGRSAHY |
| 468 | TSTSGRSAHVRG | 777 | TSGRSAHV |
| 469 | TSTSGRSAHHRG | 778 | TSGRSAHH |
| 470 | TSPSGRSEVPRG | 779 | PSGRSEVP |
| 471 | TSPSGRSAEPRG | 780 | PSGRSAEP |
| 472 | TSPSGRSAGPRG | 781 | PSGRSAGP |
| 473 | TSASGRSENARG | 782 | ASGRSENA |
| 474 | TSASGRSAEARG | 783 | ASGRSAEA |
| 475 | TSASGRSAGARG | 784 | ASGRSAGA |
| 476 | TSGTGRSATPRG | 785 | GTGRSATP |
| 477 | TSGSGRSATYRG | 786 | GSGRSATY |
| 478 | TSGSGRSATVRG | 787 | GSGRSATV |
| 479 | TSGSGRSATHRG | 788 | GSGRSATH |
| 480 | TSGTGRSATYRG | 789 | GTGRSATY |
| 481 | TSGTGRSATVRG | 790 | GTGRSATV |
| 482 | TSGTGRSATHRG | 791 | GTGRSATH |
| 483 | TSGSGRSETPRG | 792 | GSGRSETP |
| 484 | TSGTGRSETPRG | 793 | GTGRSETP |
| 485 | TSGSGRSETYRG | 794 | GSGRSETY |
| 486 | TSGSGRSETVRG | 795 | GSGRSETV |
| 487 | TSGSGRSETHRG | 796 | GSGRSETH |
| 488 | TSYTGRSAVPRG | 797 | YTGRSAVP |
| 489 | TSYSGRSAVYRG | 798 | YSGRSAVY |
| 490 | TSYSGRSAVVRG | 799 | YSGRSAVV |
| 491 | TSYSGRSAVHRG | 800 | YSGRSAVH |
| 492 | TSYTGRSAVYRG | 801 | YTGRSAVY |
| 493 | TSYTGRSAVVRG | 802 | YTGRSAVV |
| 494 | TSYTGRSAVHRG | 803 | YTGRSAVH |
| 495 | TSYSGRSEVPRG | 804 | YSGRSEVP |
| 496 | TSYTGRSEVPRG | 805 | YTGRSEVP |
| 497 | TSYSGRSEVYRG | 806 | YSGRSEVY |
| 498 | TSYSGRSEVVRG | 807 | YSGRSEVV |
| 499 | TSYSGRSEVHRG | 808 | YSGRSEVH |
| 500 | TSYTGRSAVPGG | 809 | YTGRSAVP |
| 501 | TSYSGRSAVYGG | 810 | YSGRSAVY |
| 502 | TSYSGRSAVVGG | 811 | YSGRSAVV |
| 503 | TSYSGRSAVHGG | 812 | YSGRSAVH |
| 504 | TSYTGRSAVYGG | 813 | YTGRSAVY |
| 505 | TSYTGRSAVVGG | 814 | YTGRSAVV |
| 506 | TSYTGRSAVHGG | 815 | YTGRSAVH |
| 853 | TSTSGRSANPRG | 905 | TSYTGRSANPLG |
| 854 | TSTSGRSANPAG | 906 | TSYSGRSAIPLG |
| 855 | TSTSGRSANPHG | 907 | TSISGRSANYLG |
| 856 | TSTSGRSANPIG | 908 | TSPSGRSAGPLG |
| 857 | TSTSGRSANPLG | 909 | TSYTGRSAVPLG |
| 858 | TSTSGRSANPSG | 910 | TSYTGRSAVYLG |
| 859 | ISTSGRSANPIG | 911 | TSYTGRSAVVLG |
| 860 | YSTSGRSANP1G | 912 | TSYTGRSAVHLG |
| 861 | TSYSGRSAVPAG | 913 | TSYSGRSAVPSG |
| 862 | TSPSGRSANIAG | 914 | TSPSGRSANISG |
| 863 | TSPSGRSANFAG | 915 | TSPSGRSANFSG |
| 864 | TSPTGRSANPAG | 916 | TSPTGRSANPSG |
| 865 | TSPSGRSAIPAG | 917 | TSPSGRSAIPSG |
| 866 | TSYTGRSANPAG | 918 | TSYTGRSANPSG |
| 867 | TSYSGRSAIPAG | 919 | TSYSGRSAIPSG |
| 868 | TS1SGRSANYAG | 920 | TSISGRSANYSG |
| 869 | TSPSGRSAGPAG | 921 | TSPSGRSAGPSG |
| 870 | TSYTGRSAVPAG | 922 | TSYTGRSAVPSG |
| 871 | TSYTGRSAVYAG | 923 | TSYTGRSAVYSG |
| 872 | TSYTGRSAVVAG | 924 | TSYTGRSAVVSG |
| 873 | TSYTGRSAVHAG | 925 | TSYTGRSAVHSG |
| 874 | TSYSGRSAVPHG | 926 | ISYSGRSAVPIG |
| 875 | TSPSGRSANIHG | 927 | ISPSGRSANIIG |
| 876 | TSPSGRSANFHG | 928 | ISPSGRSANFIG |
| 877 | TSPTGRSANPHG | 929 | ISPTGRSANPIG |
| 878 | TSPSGRSAIPHG | 930 | ISPSGRSAIPIG |
| 879 | TSYTGRSANPHG | 931 | ISYTGRSANPIG |
| 880 | TSYSGRSAIPHG | 932 | ISYSGRSAIPIG |
| 881 | TSISGRSANYHG | 933 | ISISGRSANYIG |
| 882 | TSPSGRSAGPHG | 934 | ISPSGRSAGPIG |
| 883 | TSYTGRSAVPHG | 935 | ISYTGRSAVPIG |
| 884 | TSYTGRSAVYHG | 936 | ISYTGRSAVYIG |
| 885 | TSYTGRSAVVHG | 937 | ISYTGRSAVVIG |
| 886 | TSYTGRSAVHHG | 938 | ISYTGRSAVHIG |
| 887 | TSYSGRSAVPIG | 939 | YSYSGRSAVPIG |
| 888 | TSPSGRSANIIG | 940 | YSPSGRSANIIG |
| 889 | TSPSGRSANFIG | 941 | YSPSGRSANFIG |
| 890 | TSPTGRSANPIG | 942 | YSPTGRSANPIG |
| 891 | TSPSGRSAIPIG | 943 | YSPSGRSAIPIG |
| 892 | TSYTGRSANPIG | 944 | YSYTGRSANPIG |
| 893 | TSYSGRSAIPIG | 945 | YSYSGRSAIPIG |
| 894 | TSISGRSANYIG | 946 | YSISGRSANYIG |
| 895 | TSPSGRSAGP1G | 947 | YSPSGRSAGPIG |
| 896 | TSYTGRSAVPIG | 948 | YSYTGRSAVPIG |

[0654] The following sequence may also be used as a protease cleavage sequence:

(SEQ ID NO: 833)
X1-X2-X3-X4-X5-X6-X7-X8

wherein, X1 to X8 each represent a single amino acid, X1 is an amino acid selected from A, D, E, F, G, H, I, K, M, N, P, Q, S, T, W and Y; X2 is an amino acid selected from A, D, E, F, H, K, L, M, P, Q, S, T, V, W and Y; X3 is an amino acid selected from A, D, E, F, G, H, I, K, L, M, N, P, Q, R, S, T, V, W and Y; X4 represents R; X5 is an amino acid selected from A, D, E, F, G, H, I, K, L, M, N, P, Q, R, S, T, V, W and Y; X6 is an amino acid selected from A, D, E, F, H, I, K, L, M, N, P, Q, R, S, T, V, W and Y; X7 is an amino acid selected from A, D, E, F, G, H, I, K, L, M, N, P, Q, R, S, T, V, W and Y; and X8 is an amino acid selected from A, D, E, F, G, H, I, K, L, M, N, P, Q, R, S, T, V, W and Y.

[0655] The following sequence may also be used as a protease cleavage sequence:

(SEQ ID NO: 834)
X1-X2-X3-X4-X5-X6-X7-X8

wherein, X1 to X8 each represent a single amino acid, X1 is an amino acid selected from A, E, F, G, H, K, M, N, P, Q, W and Y; X2 is an amino acid selected from A, D, E, F, H, K, L, M, P, Q, S, T, V, W and Y; X3 is an amino acid selected from A, D, E, F, G, H, I, K, L, M, N, P, Q, R, S, T, V, W and Y; X4 is R; X5 is an amino acid selected from A, D, E, F, G, H, I, K, L, M, N, P, Q, R, S, T, V, W and Y; X6 is an amino acid selected from A, D, E, F, H, I, K, L, M, N, P, Q, R, S, T, V, W and Y; X7 is an amino acid selected from A, D, E, F, G, H, I, K, L, M, N, P, Q, R, S, T, V, W and Y; and X8 is an amino acid selected from A, D, E, F, G, H, I, K, L, M, N, P, Q, R, S, T, V, W and Y.

[0656] The following sequence may also be used as a protease cleavage sequence:

(SEQ ID NO: 835)
X1-X2-X3-X4-X5-X6-X7-X8

wherein, X1 to X8 each represent a single amino acid, X1 is an amino acid selected from A, D, E, F, G, H, I, K, M, N, P, Q, S, T, W and Y; X2 is an amino acid selected from A, D, F, L, M, P, Q, V, W and Y; X3 is an amino acid selected from A, D, E, F, G, H, I, K, L, M, N, P, Q, R, S, T, V, W and Y; X4 is R; X5 is an amino acid selected from A, D, E, F, G, H, I, K, L, M, N, P, Q, R, S, T, V, W and Y; X6 is an amino acid selected from A, D, E, F, H, I, K, L, M, N, P, Q, R, S, T, V, W and Y; X7 is an amino acid selected from A, D, E, F, G, H, I, K, L, M, N, P, Q, R, S, T, V, W and Y; and X8 is an amino acid selected from A, D, E, F, G, H, I, K, L, M, N, P, Q, R, S, T, V, W and Y.

[0657] The following sequence may also be used as a protease cleavage sequence:

(SEQ ID NO: 836)
X1-X2-X3-X4-X5-X6-X7-X8

wherein, X1 to X8 each represent a single amino acid, X1 is an amino acid selected from A, D, E, F, G, H, I, K, M, N, P, Q, S, T, W and Y; X2 is an amino acid selected from A, D, E, F, H, K, L, M, P, Q, S, T, V, W and Y; X3 is an amino acid selected from A, E, F, H, I, K, L, M, N, P, Q, R, T, V, W and Y; X4 is R; X5 is an amino acid selected from A, D, E, F, G, H, I, K, L, M, N, P, Q, R, S, T, V, W and Y; X6 is an amino acid selected from A, D, E, F, H, I, K, L, M, N, P, Q, R, S, T, V, W and Y; X7 is an amino acid selected from A, D, E, F, G, H, I, K, L, M, N, P, Q, R, S, T, V, W and Y; and X8 is an amino acid selected from A, D, E, F, G, H, I, K, L, M, N, P, Q, R, S, T, V, W and Y.

[0658] The following sequence may also be used as a protease cleavage sequence:

(SEQ ID NO: 837)
X1-X2-X3-X4-X5-X6-X7-X8

wherein, X1 to X8 each represent a single amino acid, X1 is an amino acid selected from A, D, E, F, G, H, I, K, M, N, P, Q, S, T, W and Y; X2 is an amino acid selected from A, D, E, F, H, K, L, M, P, Q, S, T, V, W and Y; X3 is an amino acid selected from A, D, E, F, G, H, I, K, L, M, N, P, Q, R, S, T, V, W and Y; X4 is R; X5 is an amino acid selected from A, D, E, G, H, I, K, L, M, N, Q, R, T, V, W and Y; X6 is an amino acid selected from A, D, E, F, H, I, K, L, M, N, P, Q, R, S, T, V, W and Y; X7 is an amino acid selected from A, D, E, F, G, H, I, K, L, M, N, P, Q, R, S, T, V, W and Y; and X8 is an amino acid selected from A, D, E, F, G, H, I, K, L, M, N, P, Q, R, S, T, V, W and Y.

[0659] The following sequence may also be used as a protease cleavage sequence:

(SEQ ID NO: 838)
X1-X2-X3-X4-X5-X6-X7-X8

wherein, X1 to X8 each represent a single amino acid, X1 is an amino acid selected from A, D, E, F, G, H, I, K, M, N, P, Q, S, T, W and Y; X2 is an amino acid selected from A, D, E, F, H, K, L, M, P, Q, S, T, V, W and Y; X3 is an amino acid selected from A, D, E, F, G, H, I, K, L, M, N, P, Q, R, S, T, V, W and Y; X4 is R; X5 is an amino acid selected from A, D, E, F, G, H, I, K, L, M, N, P, Q, R, S, T, V, W and Y; X6 is an amino acid selected from E, F, K, M, N, P, Q, R, S and W; X7 is an amino acid selected from A, D, E, F, G, H, I, K, L, M, N, P, Q, R, S, T, V, W and Y; and X8 is an amino acid selected from A, D, E, F, G, H, I, K, L, M, N, P, Q, R, S, T, V, W and Y.

[0660] The following sequence may also be used as a protease cleavage sequence:

(SEQ ID NO: 839)
X1-X2-X3-X4-X5-X6-X7-X8

wherein, X1 to X8 each represent a single amino acid, X1 is an amino acid selected from A, D, E, F, G, H, I, K, M, N, P, Q, S, T, W and Y; X2 is an amino acid selected from A, D, E, F, H, K, L, M, P, Q, S, T, V, W and Y; X3 is an amino acid selected from A, D, E, F, G, H, I, K, L, M, N, P, Q, R, S, T, V, W and Y; X4 is R; X5 is an amino acid selected from A, D, E, F, G, H, I, K, L, M, N, P, Q, R, S, T, V, W and Y; X6 is an amino acid selected from A, D, E, F, H, I, K, L, M, N, P, Q, R, S, T, V, W and Y; X7 is an amino acid selected from A, D, F, G, L, M, P, Q, V and W; and X8 is an amino acid selected from A, D, E, F, G, H, I, K, L, M, N, P, Q, R, S, T, V, W and Y.

[0661] The following sequence may also be used as a protease cleavage sequence:

(SEQ ID NO: 840)
X1-X2-X3-X4-X5-X6-X7-X8

wherein, X1 to X8 each represent a single amino acid, X1 is an amino acid selected from A, D, E, F, G, H, I, K, M, N, P, Q, S, T, W and Y; X2 is an amino acid selected from A, D, E, F, H, K, L, M, P, Q, S, T, V, W and Y; X3 is an amino acid selected from A, D, E, F, G, H, I, K, L, M, N, P, Q, R, S, T, V, W and Y; X4 is R; X5 is an amino acid selected from A, D, E, F, G, H, I, K, L, M, N, P, Q, R, S, T, V, W and Y; X6 is an amino acid selected from A, D, E, F, H, I, K, L, M, N, P, Q, R, S, T, V, W and Y; X7 is an amino acid selected from A, D, E, F, G, H, I, K, L, M, N, P, Q, R, S, T, V, W and Y; and X8 is an amino acid selected from A, D, E, F, G, I, K, N, T and W.

[0662] The following sequence may also be used as a protease cleavage sequence:

(SEQ ID NO: 841)
X1-X2-X3-X4-X5-X6-X7-X8

wherein, X1 to X8 each represent a single amino acid, X1 is an amino acid selected from A, G, I, P, Q, S and Y; X2 is an amino acid selected from K or T; X3 is G; X4 is R; X5 is S; X6 is A; X7 is an amino acid selected from H, I and V; and X8 is an amino acid selected from H, V and Y.

[0663] The following sequence may also be used as a protease cleavage sequence:

(SEQ ID NO: 842)
X1-X2-X3-X4-X5-X6-X7-X8

wherein, X1 to X8 each represent a single amino acid, X1 is Y; X2 is an amino acid selected from S and T; X3 is G; X4 is R; X5 is S; X6 is an amino acid selected from A and E; X7 is an amino acid selected from N and V; and X8 is an amino acid selected from H, P, V and Y.

[0664] The following sequence may also be used as a protease cleavage sequence:

(SEQ ID NO: 843)
X1-X2-X3-X4-X5-X6-X7-X8-X9

wherein, X1 to X9 each represent a single amino acid, X1 is an amino acid selected from A, D, E, F, G, H, I, K, M, N, P, Q, S, T, W and Y; X2 is an amino acid selected from A, D, E, F, H, K, L, M, P, Q, S, T, V, W and Y; X3 is an amino acid selected from A, D, E, F, G, H, I, K, L, M, N, P, Q, R, S, T, V, W and Y; X4 is R; X5 is an amino acid selected from A, D, E, F, G, H, I, K, L, M, N, P, Q, R, S, T, V, W and Y; X6 is an amino acid selected from A, D, E, F, H, I, K, L, M, N, P, Q, R, S, T, V, W and Y; X7 is an amino acid selected from A, D, E, F, G, H, I, K, L, M, N, P, Q, R, S, T, V, W and Y; X8 is an amino acid selected from A, D, E, F, G, H, I, K, L, M, N, P, Q, R, S, T, V, W and Y; and X9 is an amino acid selected from A, G, H, I, L and R.

[0665] The following sequence may also be used as a protease cleavage sequence:

(SEQ ID NO: 844)
X1-X2-X3-X4-X5-X6-X7-X8-X9

wherein, X1 to X9 each represent a single amino acid, X1 is an amino acid selected from A, E, F, G, H, K, M, N, P, Q, W and Y; X2 is an amino acid selected from A, D, E, F, H, K, L, M, P, Q, S, T, V, W and Y; X3 is an amino acid selected from A, D, E, F, G, H, I, K, L, M, N, P, Q, R, S, T, V, W and Y; X4 is R; X5 is an amino acid selected from A, D, E, F, G, H, I, K, L, M, N, P, Q, R, S, T, V, W and Y; X6 is an amino acid selected from A, D, E, F, H, I, K, L, M, N, P, Q, R, S, T, V, W and Y; X7 is an amino acid selected from A, D, E, F, G, H, I, K, L, M, N, P, Q, R, S, T, V, W and Y; X8 is an amino acid selected from A, D, E, F, G, H, I, K, L, M, N, P, Q, R, S, T, V, W and Y; and X9 is an amino acid selected from A, G, H, I, L and R.

[0666] The following sequence may also be used as a protease cleavage sequence:

(SEQ ID NO: 845)
X1-X2-X3-X4-X5-X6-X7-X8-X9

wherein, X1 to X9 each represent a single amino acid, X1 is an amino acid selected from A, D, E, F, G, H, I, K, M, N, P, Q, S, T, W and Y; X2 is an amino acid selected from A, D, F, L, M, P, Q, V, W and Y; X3 is an amino acid selected from A, D, E, F, G, H, I, K, L, M, N, P, Q, R, S, T, V, W and Y; X4 is R; X5 is an amino acid selected from A, D, E, F, G, H, I, K, L, M, N, P, Q, R, S, T, V, W and Y; X6 is an amino acid selected from A, D, E, F, H, I, K, L, M, N, P, Q, R, S, T, V, W and Y; X7 is an amino acid selected from A, D, E, F, G, H, I, K, L, M, N, P, Q, R, S, T, V, W and Y; X8 is an amino acid selected from A, D, E, F, G, H, I, K, L, M, N, P, Q, R, S, T, V, W and Y; and X9 is an amino acid selected from A, G, H, I, L and R.

[0667] The following sequence may also be used as a protease cleavage sequence:

(SEQ ID NO: 846)
X1-X2-X3-X4-X5-X6-X7-X8-X9

wherein, X1 to X9 each represent a single amino acid, X1 is an amino acid selected from A, D, E, F, G, H, I, K, M, N, P, Q, S, T, W and Y; X2 is an amino acid selected from A, D, E, F, H, K, L, M, P, Q, S, T, V, W and Y; X3 is an amino acid selected from A, E, F, H, I, K, L, M, N, P, Q, R, T, V, W and Y; X4 is R; X5 is an amino acid selected from A, D, E, F, G, H, I, K, L, M, N, P, Q, R, S, T, V, W and Y; X6 is an amino acid selected from A, D, E, F, H, I, K, L, M, N, P, Q, R, S, T, V, W and Y; X7 is an amino acid selected from A, D, E, F, G, H, I, K, L, M, N, P, Q, R, S, T, V, W and Y; X8 is an amino acid selected from A, D, E, F, G, H, I, K, L, M, N, P, Q, R, S, T, V, W and Y; and X9 is an amino acid selected from A, G, H, I, L and R.

[0668] The following sequence may also be used as a protease cleavage sequence:

(SEQ ID NO: 847)
X1-X2-X3-X4-X5-X6-X7-X8-X9

wherein, X1 to X9 each represent a single amino acid, X1 is an amino acid selected from A, D, E, F, G, H, I, K, M, N, P, Q, S, T, W and Y; X2 is an amino acid selected from A, D, E, F, H, K, L, M, P, Q, S, T, V, W and Y; X3 is an amino acid selected from A, D, E, F, G, H, I, K, L, M, N, P, Q, R, S, T, V, W and Y; X4 is R; X5 is an amino acid selected from A, D, E, G, H, I, K, L, M, N, Q, R, T, V, W and Y; X6 is an amino acid selected from A, D, E, F, H, I, K, L, M, N, P, Q, R, S, T, V, W and Y; X7 is an amino acid selected from A, D, E, F, G, H, I, K, L, M, N, P, Q, R, S, T, V, W and Y; X8 is an amino acid selected from A, D, E, F, G, H, I, K, L, M, N, P, Q, R, S, T, V, W and Y; and X9 is an amino acid selected from A, G, H, I, L and R.

[0669] The following sequence may also be used as a protease cleavage sequence:

(SEQ ID NO: 848)
X1-X2-X3-X4-X5-X6-X7-X8-X9

wherein, X1 to X9 each represent a single amino acid, X1 is an amino acid selected from A, D, E, F, G, H, I, K, M, N, P, Q, S, T, W and Y; X2 is an amino acid selected from A, D, E, F, H, K, L, M, P, Q, S, T, V, W and Y; X3 is an amino acid selected from A, D, E, F, G, H, I, K, L, M, N, P, Q, R, S, T, V, W and Y; X4 is R; X5 is an amino acid selected from A, D, E, F, G, H, I, K, L, M, N, P, Q, R, S, T, V, W and Y; X6 is an amino acid selected from E, F, K, M, N, P, Q, R, S and W; X7 is an amino acid selected from A, D, E, F, G, H, I, K, L, M, N, P, Q, R, S, T, V, W and Y; X8 is an amino acid selected from A, D, E, F, G, H, I, K, L, M, N, P, Q, R, S, T, V, W and Y; and X9 is an amino acid selected from A, G, H, I, L and R.

[0670] The following sequence may also be used as a protease cleavage sequence:

(SEQ ID NO: 849)
X1-X2-X3-X4-X5-X6-X7-X8-X9

wherein, X1 to X9 each represent a single amino acid, X1 is an amino acid selected from A, D, E, F, G, H, I, K, M, N, P, Q, S, T, W and Y; X2 is an amino acid selected from A, D, E, F, H, K, L, M, P, Q, S, T, V, W and Y; X3 is an amino acid selected from A, D, E, F, G, H, I, K, L, M, N, P, Q, R, S, T, V, W and Y; X4 is R; X5 is an amino acid selected from A, D, E, F, G, H, I, K, L, M, N, P, Q, R, S, T, V, W and Y; X6 is an amino acid selected from A, D, E, F, H, I, K, L, M, N, P, Q, R, S, T, V, W and Y; X7 is an amino acid selected from A, D, F, G, L, M, P, Q, V and W; X8 is an amino acid selected from A, D, E, F, G, H, I, K, L, M, N, P, Q, R, S, T, V, W and Y; and X9 is an amino acid selected from A, G, H, I, L and R.

[0671] The following sequence may also be used as a protease cleavage sequence:

(SEQ ID NO: 850)
X1-X2-X3-X4-X5-X6-X7-X8-X9

wherein, X1 to X9 each represent a single amino acid, X1 is an amino acid selected from A, D, E, F, G, H, I, K, M, N, P, Q, S, T, W and Y; X2 is an amino acid selected from A, D, E, F, H, K, L, M, P, Q, S, T, V, W and Y; X3 is an amino acid selected from A, D, E, F, G, H, I, K, L, M, N, P, Q, R, S, T, V, W and Y; X4 is R; X5 is an amino acid selected from A, D, E, F, G, H, I, K, L, M, N, P, Q, R, S, T, V, W and Y; X6 is an amino acid selected from A, D, E, F, H, I, K, L, M, N, P, Q, R, S, T, V, W and Y; X7 is an amino acid selected from A, D, E, F, G, H, I, K, L, M, N, P, Q, R, S, T, V, W and Y; X8 is an amino acid selected from A, D, E, F, G, I, K, N, T and W; and X9 is an amino acid selected from A, G, H, I, L and R.

[0672] The following sequence may also be used as a protease cleavage sequence:

(SEQ ID NO: 851)
X1-X2-X3-X4-X5-X6-X7-X8-X9

wherein, X1 to X9 each represent a single amino acid, X1 is an amino acid selected from A, G, I, P, Q, S and Y; X2 is an amino acid selected from K or T; X3 is G; X4 is R; X5 is S; X6 is A; X7 is an amino acid selected from H, I and V; X8 is an amino acid selected from H, V and Y; and X9 is an amino acid selected from A, G, H, I, L and R.

[0673] The following sequence may also be used as a protease cleavage sequence:

(SEQ ID NO: 852)
X1-X2-X3-X4-X5-X6-X7-X8-X9

wherein, X1 to X9 each represent a single amino acid, X1 is Y; X2 is an amino acid selected from S and T; X3 is G; X4 is R; X5 is S; X6 is an amino acid selected from A and E; X8 is an amino acid selected from H, P, V and Y; and X9 is an amino acid selected from A, G, H, I, L and R.

[0674] The following sequence may also be used as a protease cleavage sequence:

(SEQ ID NO: 1062)
X10-X11-X1-X2-X3-X4-X5-X6-X7-X8

wherein, X1 to X11 each represent a single amino acid, X10 is an amino acid selected from I, T and Y; X11 is S; X1 is an amino acid selected from A, D, E, F, G, H, I, K, M, N, P, Q, S, T, W and Y; X2 is an amino acid selected from A, D, E, F, H, K, L, M, P, Q, S, T, V, W and Y; X3 is an amino acid selected from A, D, E, F, G, H, I, K, L, M, N, P, Q, R, S, T, V, W and Y; X4 is R; X5 is an amino acid selected from A, D, E, F, G, H, I, K, L, M, N, P, Q, R, S, T, V, W and Y; X6 is an amino acid selected from A, D, E, F, H, I, K, L, M, N, P, Q, R, S, T, V, W and Y; X7 is an amino acid selected from A, D, E, F, G, H, I, K, L, M, N, P, Q, R, S, T, V, W and Y; and X8 is an amino acid selected from A, D, E, F, G, H, I, K, L, M, N, P, Q, R, S, T, V, W and Y.

[0675] The following sequence may also be used as a protease cleavage sequence:

(SEQ ID NO: 1063)
X10-X11-X1-X2-X3-X4-X5-X6-X7-X8

wherein, X1 to X11 each represent a single amino acid, X10 is an amino acid selected from I, T and Y; X11 is S; X1 is an amino acid selected from A, E, F, G, H, K, M, N, P, Q, W and Y; X2 is an amino acid selected from A, D, E, F, H, K, L, M, P, Q, S, T, V, W and Y; X3 is an amino acid selected from A, D, E, F, G, H, I, K, L, M, N, P, Q, R, S, T, V, W and Y; X4 is R; X5 is an amino acid selected from A, D, E, F, G, H, I, K, L, M, N, P, Q, R, S, T, V, W and Y; X6 is an amino acid selected from A, D, E, F, H, I, K, L, M, N, P, Q, R, S, T, V, W and Y; X7 is an amino acid selected from A, D, E, F, G, H, I, K, L, M, N, P, Q, R, S, T, V, W and Y; and X8 is an amino acid selected from A, D, E, F, G, H, I, K, L, M, N, P, Q, R, S, T, V, W and Y.

[0676] The following sequence may also be used as a protease cleavage sequence:

(SEQ ID NO: 1064)
X10-X11-X1-X2-X3-X4-X5-X6-X7-X8

wherein, X1 to X11 each represent a single amino acid, X10 is an amino acid selected from I, T and Y; X11 is S; X1 is an amino acid selected from A, D, E, F, G, H, I, K, M, N, P, Q, S, T, W and Y; X2 is an amino acid selected from A, D, F, L, M, P, Q, V, W and Y; X3 is an amino acid selected from A, D, E, F, G, H, I, K, L, M, N, P, Q, R, S, T, V, W and Y; X4 is R; X5 is an amino acid selected from A, D, E, F, G, H, I, K, L, M, N, P, Q, R, S, T, V, W and Y; X6 is an amino acid selected from A, D, E, F, H, I, K, L, M, N, P, Q, R, S, T, V, W and Y; X7 is an amino acid selected from A, D, E, F, G, H, I, K, L, M, N, P, Q, R, S, T, V, W and Y; and X8 is an amino acid selected from A, D, E, F, G, H, I, K, L, M, N, P, Q, R, S, T, V, W and Y.

[0677] The following sequence may also be used as a protease cleavage sequence:

(SEQ ID NO: 1065)
X10-X11-X1-X2-X3-X4-X5-X6-X7-X8

wherein, X1 to X11 each represent a single amino acid, X10 is an amino acid selected from I, T and Y; X11 is S; X1 is an amino acid selected from A, D, E, F, G, H, I, K, M, N, P, Q, S, T, W and Y; X2 is an amino acid selected from A, D, E, F, H, K, L, M, P, Q, S, T, V, W and Y; X3 is an amino acid selected from A, E, F, H, I, K, L, M, N, P, Q, R, T, V, W and Y; X4 is R; X5 is an amino acid selected from A, D, E, F, G, H, I, K, L, M, N, P, Q, R, S, T, V, W and Y; X6 is an amino acid selected from A, D, E, F, H, I, K, L, M, N, P, Q, R, S, T, V, W and Y; X7 is an amino acid selected from A, D, E, F, G, H, I, K, L, M, N, P, Q, R, S, T, V, W and Y; and X8 is an amino acid selected from A, D, E, F, G, H, I, K, L, M, N, P, Q, R, S, T, V, W and Y.

[0678] The following sequence may also be used as a protease cleavage sequence:

(SEQ ID NO: 1066)
X10-X11-X1-X2-X3-X4-X5-X6-X7-X8

wherein, X1 to X11 each represent a single amino acid, X10 is an amino acid selected from I, T and Y; X11 is S; X1 is an amino acid selected from A, D, E, F, G, H, I, K, M, N, P, Q, S, T, W and Y; X2 is an amino acid selected from A, D, E, F, H, K, L, M, P, Q, S, T, V, W and Y; X3 is an amino acid selected from A, D, E, F, G, H, I, K, L, M, N, P, Q, R, S, T, V, W and Y; X4 is R; X5 is an amino acid selected from A, D, E, G, H, I, K, L, M, N, Q, R, T, V, W and Y; X6 is an amino acid selected from A, D, E, F, H, I, K, L, M, N, P, Q, R, S, T, V, W and Y; X7 is an amino acid selected from A, D, E, F, G, H, I, K, L, M, N, P, Q, R, S, T, V, W and Y; and X8 is an amino acid selected from A, D, E, F, G, H, I, K, L, M, N, P, Q, R, S, T, V, W and Y.

[0679] The following sequence may also be used as a protease cleavage sequence:

(SEQ ID NO: 1067)
X10-X11-X1-X2-X3-X4-X5-X6-X7-X8

wherein, X1 to X11 each represent a single amino acid, X10 is an amino acid selected from I, T and Y; X11 is S; X1 is an amino acid selected from A, D, E, F, G, H, I, K, M, N, P, Q, S, T, W and Y; X2 is an amino acid selected from A, D, E, F, H, K, L, M, P, Q, S, T, V, W and Y; X3 is an amino acid selected from A, D, E, F, G, H, I, K, L, M, N, P, Q, R, S, T, V, W and Y; X4 is R; X5 is an amino acid selected from A, D, E, F, G, H, I, K, L, M, N, P, Q, R, S, T, V, W and Y; X6 is an amino acid selected from E, F, K, M, N, P, Q, R, S and W; X7 is an amino acid selected from A, D, E, F, G, H, I, K, L, M, N, P, Q, R, S, T, V, W and Y; and X8 is an amino acid selected from A, D, E, F, G, H, I, K, L, M, N, P, Q, R, S, T, V, W and Y.

[0680] The following sequence may also be used as a protease cleavage sequence:

(SEQ ID NO: 1068)
X10-X11-X1-X2-X3-X4-X5-X6-X7-X8

wherein, X1 to X11 each represent a single amino acid, X10 is an amino acid selected from I, T and Y; X11 is S; X1 is an amino acid selected from A, D, E, F, G, H, I, K, M, N, P, Q, S, T, W and Y; X2 is an amino acid selected from A, D, E, F, H, K, L, M, P, Q, S, T, V, W and Y; X3 is an amino acid selected from A, D, E, F, G, H, I, K, L, M, N, P, Q, R, S, T, V, W and Y; X4 is R; X5 is an amino acid selected from A, D, E, F, G, H, I, K, L, M, N, P, Q, R, S, T, V, W and Y; X6 is an amino acid selected from A, D, E, F, H, I, K, L, M, N, P, Q, R, S, T, V, W and Y; X7 is an amino acid selected from A, D, F, G, L, M, P, Q, V and W; and X8 is an amino acid selected from A, D, E, F, G, H, I, K, L, M, N, P, Q, R, S, T, V, W and Y.

[0681] The following sequence may also be used as a protease cleavage sequence:

(SEQ ID NO: 1069)
X10-X11-X1-X2-X3-X4-X5-X6-X7-X8

wherein, X1 to X11 each represent a single amino acid, X10 is an amino acid selected from I, T and Y; X11 is S; X1 is an amino acid selected from A, D, E, F, G, H, I, K, M, N, P, Q, S, T, W and Y; X2 is an amino acid selected from A, D, E, F, H, K, L, M, P, Q, S, T, V, W and Y; X3 is an amino acid selected from A, D, E, F, G, H, I, K, L, M, N, P, Q, R, S, T, V, W and Y; X4 is R; X5 is an amino acid selected from A, D, E, F, G, H, I, K, L, M, N, P, Q, R, S, T, V, W and Y; X6 is an amino acid selected from A, D, E, F, H, I, K, L, M, N, P, Q, R, S, T, V, W and Y; X7 is an amino acid selected from A, D, E, F, G, H, I, K, L, M, N, P, Q, R, S, T, V, W and Y; and X8 is an amino acid selected from A, D, E, F, G, I, K, N, T and W.

[0682] The following sequence may also be used as a protease cleavage sequence:

(SEQ ID NO: 1070)
X10-X11-X1-X2-X3-X4-X5-X6-X7-X8

wherein, X1 to X11 each represent a single amino acid, X10 is an amino acid selected from I, T and Y; X11 is S; X1 is an amino acid selected from A, G, I, P, Q, S and Y; X2 is an amino acid selected from K or T; X3 is G; X4 is R; X5 is S; X6 is A; X7 is an amino acid selected from H, I and V; and X8 is an amino acid selected from H, V and Y.

[0683] The following sequence may also be used as a protease cleavage sequence:

(SEQ ID NO: 1071)
X10-X11-X1-X2-X3-X4-X5-X6-X7-X8

wherein, X1 to X11 each represent a single amino acid, X10 is an amino acid selected from I, T and Y; X11 is S; X1 is Y; X2 is an amino acid selected from S and T; X3 is G; X4 is R; X5 is S; X6 is an amino acid selected from A and E; X7 is an amino acid selected from N and V; and X8 is an amino acid selected from H, P, V and Y.

[0684] The following sequence may also be used as a protease cleavage sequence:

(SEQ ID NO: 1072)
X10-X11-X1-X2-X3-X4-X5-X6-X7-X8-X9

wherein, X1 to X11 each represent a single amino acid, X10 is an amino acid selected from I, T and Y; X11 is S; X1 is an amino acid selected from A, D, E, F, G, H, I, K, M, N, P, Q, S, T, W and Y; X2 is an amino acid selected from A, D, E, F, H, K, L, M, P, Q, S, T, V, W and Y; X3 is an amino acid selected from A, D, E, F, G, H, I, K, L, M, N, P, Q, R, S, T, V, W and Y; X4 is R; X5 is an amino acid selected from A, D, E, F, G, H, I, K, L, M, N, P, Q, R, S, T, V, W and Y; X6 is an amino acid selected from A, D, E, F, H, I, K, L, M, N, P, Q, R, S, T, V, W and Y; X7 is an amino acid selected from A, D, E, F, G, H, I, K, L, M, N, P, Q, R, S, T, V, W and Y; X8 is an amino acid selected from A, D, E, F, G, H, I, K, L, M, N, P, Q, R, S, T, V, W and Y; and X9 is an amino acid selected from A, G, H, I, L and R.

[0685] The following sequence may also be used as a protease cleavage sequence:

(SEQ ID NO: 1073)
X10-X11-X1-X2-X3-X4-X5-X6-X7-X8-X9

wherein, X1 to X11 each represent a single amino acid, X10 is an amino acid selected from I, T and Y; X11 is S; X1 is an amino acid selected from A, E, F, G, H, K, M, N, P, Q, W and Y; X2 is an amino acid selected from A, D, E, F, H, K, L, M, P, Q, S, T, V, W and Y; X3 is an amino acid selected from A, D, E, F, G, H, I, K, L, M, N, P, Q, R, S, T, V, W and Y; X4 is R; X5 is an amino acid selected from A, D, E, F, G, H, I, K, L, M, N, P, Q, R, S, T, V, W and Y; X6 is an amino acid selected from A, D, E, F, H, I, K, L, M, N, P, Q, R, S, T, V, W and Y; X7 is an amino acid selected from A, D, E, F, G, H, I, K, L, M, N, P, Q, R, S, T, V, W and Y; X8 is an amino acid selected from A, D, E, F, G, H, I, K, L, M, N, P, Q, R, S, T, V, W and Y; and X9 is an amino acid selected from A, G, H, I, L and R.

[0686] The following sequence may also be used as a protease cleavage sequence:

(SEQ ID NO: 1074)
X10-X11-X1-X2-X3-X4-X5-X6-X7-X8-X9

wherein, X1 to X11 each represent a single amino acid, X10 is an amino acid selected from I, T and Y; X11 is S; X1 is an amino acid selected from A, D, E, F, G, H, I, K, M, N, P, Q, S, T, W and Y; X2 is an amino acid selected from A, D, F, L, M, P, Q, V, W and Y; X3 is an amino acid selected from A, D, E, F, G, H, I, K, L, M, N, P, Q, R, S, T, V, W and Y; X4 is R; X5 is an amino acid selected from A, D, E, F, G, H, I, K, L, M, N, P, Q, R, S, T, V, W and Y; X6 is an amino acid selected from A, D, E, F, H, I, K, L, M, N, P, Q, R, S, T, V, W and Y; X7 is an amino acid selected from A, D, E, F, G, H, I, K, L, M, N, P, Q, R, S, T, V, W and Y; X8 is an amino acid selected from A, D, E, F, G, H, I, K, L, M, N, P, Q, R, S, T, V, W and Y; and X9 is an amino acid selected from A, G, H, I, L and R.

[0687] The following sequence may also be used as a protease cleavage sequence:

(SEQ ID NO: 1075)
X10-X11-X1-X2-X3-X4-X5-X6-X7-X8-X9

wherein, X1 to X11 each represent a single amino acid, X10 is an amino acid selected from I, T and Y; X11 is S; X1 is an amino acid selected from A, D, E, F, G, H, I, K, M, N, P, Q, S, T, W and Y; X2 is an amino acid selected from A, D, E, F, H, K, L, M, P, Q, S, T, V, W and Y; X3 is an amino acid selected from A, E, F, H, I, K, L, M, N, P, Q, R, T, V, W and Y; X4 is R; X5 is an amino acid selected from A, D, E, F, G, H, I, K, L, M, N, P, Q, R, S, T, V, W and Y; X6 is an amino acid selected from A, D, E, F, H, I, K, L, M, N, P, Q, R, S, T, V, W and Y; X7 is an amino acid selected from A, D, E, F, G, H, I, K, L, M, N, P, Q, R, S, T, V, W and Y; X8 is an amino acid selected from A, D, E, F, G, H, I, K, L, M, N, P, Q, R, S, T, V, W and Y; and X9 is an amino acid selected from A, G, H, I, L and R.

[0688] The following sequence may also be used as a protease cleavage sequence:

(SEQ ID NO: 1076)
X10-X11-X1-X2-X3-X4-X5-X6-X7-X8-X9

wherein, X1 to X11 each represent a single amino acid, X10 is an amino acid selected from I, T and Y; X11 is S; X1 is an amino acid selected from A, D, E, F, G, H, I, K, M, N, P, Q, S, T, W and Y; X2 is an amino acid selected from A, D, E, F, H, K, L, M, P, Q, S, T, V, W and Y; X3 is an amino acid selected from A, D, E, F, G, H, I, K, L, M, N, P, Q, R, S, T, V, W and Y; X4 is R; X5 is an amino acid selected from A, D, E, G, H, I, K, L, M, N, Q, R, T, V, W and Y; X6 is an amino acid selected from A, D, E, F, H, I, K, L, M, N, P, Q, R, S, T, V, W and Y; X7 is an amino acid selected from A, D, E, F, G, H, I, K, L, M, N, P, Q, R, S, T, V, W and Y; X8 is an amino acid selected from A, D, E, F, G, H, I, K, L, M, N, P, Q, R, S, T, V, W and Y; and X9 is an amino acid selected from A, G, H, I, L and R.

[0689] The following sequence may also be used as a protease cleavage sequence:

(SEQ ID NO: 1077)
X10-X11-X1-X2-X3-X4-X5-X6-X7-X8-X9

wherein, X1 to X11 each represent a single amino acid, X10 is an amino acid selected from I, T and Y; X11 is S; X1 is an amino acid selected from A, D, E, F, G, H, I, K, M, N, P, Q, S, T, W and Y; X2 is an amino acid selected from A, D, E, F, H, K, L, M, P, Q, S, T, V, W and Y; X3 is an amino acid selected from A, D, E, F, G, H, I, K, L, M, N, P, Q, R, S, T, V, W and Y; X4 is R; X5 is an amino acid selected from A, D, E, F, G, H, I, K, L, M, N, P, Q, R, S, T, V, W and Y; X6 is an amino acid selected from E, F, K, M, N, P, Q, R, S and W; X7 is an amino acid selected from A, D, E, F, G, H, I, K, L, M, N, P, Q, R, S, T, V, W and Y; X8 is an amino acid selected from A, D, E, F, G, H, I, K, L, M, N, P, Q, R, S, T, V, W and Y; and X9 is an amino acid selected from A, G, H, I, L and R.

[0690] The following sequence may also be used as a protease cleavage sequence:

(SEQ ID NO: 1078)
X10-X11-X1-X2-X3-X4-X5-X6-X7-X8-X9

wherein, X1 to X11 each represent a single amino acid, X10 is an amino acid selected from I, T and Y; X11 is S; X1 is an amino acid selected from A, D, E, F, G, H, I, K, M, N, P, Q, S, T, W and Y; X2 is an amino acid selected from A, D, E, F, H, K, L, M, P, Q, S, T, V, W and Y; X3 is an amino acid selected from A, D, E, F, G, H, I, K, L, M, N, P, Q, R, S, T, V, W and Y; X4 is R; X5 is an amino acid selected from A, D, E, F, G, H, I, K, L, M, N, P, Q, R, S, T, V, W and Y; X6 is an amino acid selected from A, D, E, F, H, I, K, L, M, N, P, Q, R, S, T, V, W and Y; X7 is an amino acid selected from A, D, F, G, L, M, P, Q, V and W; X8 is an amino acid selected from A, D, E, F, G, H, I, K, L, M, N, P, Q, R, S, T, V, W and Y; and X9 is an amino acid selected from A, G, H, I, L and R.

[0691] The following sequence may also be used as a protease cleavage sequence:

(SEQ ID NO: 1079)
X10-X11-X1-X2-X3-X4-X5-X6-X7-X8-X9

wherein, X1 to X11 each represent a single amino acid, X10 is an amino acid selected from I, T and Y; X11 is S; X1 is an amino acid selected from A, D, E, F, G, H, I, K, M, N, P, Q, S, T, W and Y; X2 is an amino acid selected from A, D, E, F, H, K, L, M, P, Q, S, T, V, W and Y; X3 is an amino acid selected from A, D, E, F, G, H, I, K, L, M, N, P, Q, R, S, T, V, W and Y; X4 is R; X5 is an amino acid selected from A, D, E, F, G, H, I, K, L, M, N, P, Q, R, S, T, V, W and Y; X6 is an amino acid selected from A, D, E, F, H, I, K, L, M, N, P, Q, R, S, T, V, W and Y; X7 is an amino acid selected from A, D, E, F, G, H, I, K, L, M, N, P, Q, R, S, T, V, W and Y; X8 is an amino acid selected from A, D, E, F, G, I, K, N, T and W; and X9 is an amino acid selected from A, G, H, I, L and R.

[0692] The following sequence may also be used as a protease cleavage sequence:

(SEQ ID NO: 1080)
X10-X11-X1-X2-X3-X4-X5-X6-X7-X8-X9

wherein, X1 to X11 each represent a single amino acid, X10 is an amino acid selected from I, T and Y; X11 is S; X1 is an amino acid selected from A, G, I, P, Q, S and Y; X2 is an amino acid selected from K or T; X3 is G; X4 is R; X5 is S; X6 is A; X7 is an amino acid selected from H, I and V; X8 is an amino acid selected from H, V and Y; and X9 is an amino acid selected from A, G, H, I, L and R.

[0693] The following sequence may also be used as a protease cleavage sequence:

(SEQ ID NO: 1081)
X10-X11-X1-X2-X3-X4-X5-X6-X7-X8-X9

wherein, X1 to X11 each represent a single amino acid, X10 is an amino acid selected from I, T and Y; X11 is S; X1 is Y; X2 is an amino acid selected from S and T; X3 is G; X4 is R; X5 is S; X6 is an amino acid selected from A and E; X7 is an amino acid selected from N and V; X8 is an amino acid selected from H, P, V and Y; and X9 is an amino acid selected from A, G, H, I, L and R.

[0694] In addition to using the above-mentioned protease cleavage sequences, novel protease cleavage sequences may also be obtained by screening. For example, based on the result of crystal structure analysis of a known protease cleavage sequence, novel protease cleavage sequences can be explored by changing the interaction of active residues/recognition residues of the cleavage sequence and the enzyme. Novel protease cleavage sequences can also be explored by altering amino acids in a known protease cleavage sequence and examining interaction between the altered sequence and the protease. As another example, protease cleavage sequences can be explored by examining interaction of the protease with a library of peptides displayed using an in vitro display method such as phage display and ribosome display, or with an array of peptides immobilized onto a chip or beads.

[0695] Interaction between a protease cleavage sequence and a protease can be examined by testing cleavage of the sequence by the protease in vitro or in vivo.

[0696] Cleaved fragments after protease treatment can be separated by electrophoresis such as SDS-PAGE and quantified to evaluate the protease cleavage sequence, the activity of the protease, and the cleavage ratio of a molecule into which the protease cleavage sequence has been introduced. A non-limiting embodiment of the method of evaluating the cleavage ratio of a molecule into which a protease cleavage sequence has been introduced includes the following method: for example, when the cleavage ratio of an antibody variant into which a protease cleavage sequence has been introduced is evaluated using recombinant human u-Plasminogen Activator/Urokinase (human uPA, huPA) (R&D Systems; 1310-SE-010) or recombinant human Matriptase/ST14 Catalytic Domain (human MT-SP1, hMT-SP1) (R&D Systems; 3946-SE-010), 100 Qg/mL of the antibody variant is reacted with 40 nM huPA or 3 nM hMT-SP1 in PBS at 37° C. for one hour, and then subjected to capillary electrophoresis immunoassay. Capillary electrophoresis immunoassay can be performed using Wes (Protein Simple), but the present method is not limited thereto. As an alternative to capillary electrophoresis immunoassay, SDS-PAGE and such may be performed for separation, followed by detection with Western blotting. The present method is not limited to these methods. Before and after cleavage, the light chain can be detected using anti-human lambda chain HRP-labeled antibody (abcam; ab9007), but any antibody that can detect cleavage fragments may be used. The area of each peak obtained after protease treatment is output using software for Wes (Compass for SW; Protein Simple), and the cleavage ratio (%) of the antibody variant can be determined with the following formula:

(Peak area of cleaved light chain)×100/(Peak area of cleaved light chain+Peak area of uncleaved light chain)
[0697] Cleavage ratios can be determined if protein fragments are detectable before and after protease treatment. Cleavage ratios can be determined not only for antibody variants but also for various protein molecules into which a protease cleavage sequence has been introduced.

[0698] The in vivo cleavage ratio of a molecule into which a protease cleavage sequence has been introduced can be determined by administering the molecule into animals and detecting the administered molecule in blood samples. For example, an antibody variant into which a protease cleavage sequence has been introduced is administered to mice, and plasma is collected from their blood samples. The antibody is purified from the plasma according to a method known to those skilled in the art using Dynabeads Protein A (Thermo; 10001D), and then subjected to capillary electrophoresis immunoassay to evaluate the protease cleavage ratio of the antibody variant. Capillary electrophoresis immunoassay can be performed using Wes (Protein Simple), but the present method is not limited thereto. As an alternative to capillary electrophoresis immunoassay, SDS-PAGE and such may be performed for separation, followed by detection with Western blotting. The present method is not limited to these methods. The light chain of the antibody variant collected from mice can be detected using anti-human lambda chain HRP-labeled antibody (abcam; ab9007), but any antibody that can detect cleavage fragments may be used. Once the area of each peak obtained by capillary electrophoresis immunoassay is output using software for Wes (Compass for SW; Protein Simple), the ratio of the remaining light chain can be calculated as [Peak area of light chain]/[Peak area of heavy chain] to determine the ratio of the full-length light chain that remain uncleaved in the mouse body. In vivo cleavage efficiencies can be determined if protein fragments collected from a living organism are detectable. Cleavage ratios can be determined not only for antibody variants but also for various protein molecules into which a protease cleavage sequence has been introduced. Calculation of cleavage ratios by the above-mentioned methods enables, for example, comparison of the in vivo cleavage ratios of antibody variants into which different cleavage sequences have been introduced, and comparison of the cleavage ratio of a single antibody variant between different animal models such as a normal mouse model and a tumor-grafted mouse model.

[0699] For example, the protease cleavage sequences shown in Table 1 have all been newly discovered by the present inventors. Polypeptides containing these protease cleavage sequences are all useful as protease substrates which are hydrolyzed by the action of proteases. Thus, the present invention provides protease substrates comprising a sequence selected from SEQ ID NOs: 833-852 and 1062-1081, and the sequences listed in Table 1. The protease substrates of the present invention can be utilized as, for example, a library from which one with properties that suit the purpose can be selected to be incorporated into a polypeptide of the present invention. Specifically, in order to cleave the polypeptide of the present invention selectively by a protease localized in the lesion, the substrates can be evaluated for sensitivity to that protease. When a polypeptide of the present invention is administered in vivo, the molecule may come in contact with various proteases before reaching the lesion. Therefore, the molecule should preferably have sensitivity to the protease localized to the lesion and also as high resistance as possible to the other proteases. In order to select a desired protease cleavage sequence depending on the purpose, each protease substrate can be analyzed in advance for sensitivity to various proteases comprehensively to find its protease resistance. Based on the obtained protease resistance spectra, it is possible to find a protease cleavage sequence with necessary sensitivity and resistance.

[0700] Alternatively, a polypeptide into which a protease cleavage sequence has been incorporated undergoes not only enzymatic actions by proteases but also various environmental stresses such as pH changes, temperature, and oxidative/reductive stress, before reaching the lesion. Based on the comparative information about resistance to these external factors among the protease substrates, protease cleavage sequence with desired properties can be selected.

[0701] In one embodiment of the present invention, a flexible linker is further attached to either one end or both ends of the protease cleavage sequence. The flexible linker at one end of the protease cleavage sequence can be referred to as a first flexible linker, and the flexible linker at the other end can be referred to as a second flexible linker. In a particular embodiment, the protease cleavage sequence and the flexible linker have any of the following formulas:

(protease cleavage sequence),

(first flexible linker)-(protease cleavage sequence),

(protease cleavage sequence)-(second flexible linker), and

(first flexible linker)-(protease cleavage sequence)-(second flexible linker).

The flexible linker according to the present embodiment is preferably a peptide linker. The first flexible linker and the second flexible linker each independently and arbitrarily exist and are identical or different flexible linkers each containing at least one flexible amino acid (Gly, etc.). The flexible linker contains, for example, a sufficient number of residues (amino acids arbitrarily selected from Arg, Ile, Gln, Glu, Cys, Tyr, Trp, Thr, Val, His, Phe, Pro, Met, Lys, Gly, Ser, Asp, Asn, Ala, etc., particularly Gly, Ser, Asp, Asn, and Ala, in particular, Gly and Ser, especially Gly, etc.) for the protease cleavage sequence to obtain the desired protease accessibility.

[0702] The flexible linker suitable for use at both ends of the protease cleavage sequence is usually a flexible linker that improves the access of protease to the protease cleavage sequence and elevates the cleavage efficiency of the protease. A suitable flexible linker may be readily selected and can be preferably selected from among different lengths such as 1 amino acid (Gly, etc.) to 20 amino acids, 2 amino acids to 15 amino acids, or 3 amino acids to 12 amino acids including 4 amino acids to 10 amino acids, 5 amino acids to 9 amino acids, 6 amino acids to 8 amino acids, or 7 amino acids to 8 amino acids. In some embodiments of the present invention, the flexible linker is a peptide linker of 1 to 7 amino acids.

[0703] Examples of the flexible linker include, but are not limited to, glycine polymers (G)n, glycine-serine polymers (including e.g., (GS)n, (GSGGS: SEQ ID NO: 27)n and (GGGS: SEQ ID NO: 28)n, wherein n is an integer of at least 1), glycine-alanine polymers, alanine-serine polymers, and other flexible linkers well known in conventional techniques.

[0704] Among them, glycine polymers and glycine-serine polymers are receiving attention because these amino acids are relatively unstructured and easily function as neutral tethers between components.

[0705] Examples of the flexible linker consisting of the glycine-serine polymer include, but are not limited to,

Ser
Gly•Ser (GS)
Ser•Gly (SG)
Gly•Gly•Ser (GGS)
Gly•Ser•Gly (GSG)
Ser•Gly•Gly (SGG)
Gly•Ser•Ser (GSS)
Ser•Ser•Gly (SSG)
Ser•Gly•Ser (SGS)
(GGGS, SEQ ID NO: 28)
Gly•Gly•Gly•Ser
(GGSG, SEQ ID NO: 29)
Gly•Gly•Ser•Gly
(GSGG, SEQ ID NO: 46)
Gly•Ser•Gly•Gly
(SGGG, SEQ ID NO: 47)
Ser•Gly•Gly•Gly
(GSSG, SEQ ID NO: 48)
Gly•Ser•Ser•Gly
(GGGGS, SEQ ID NO: 49)
Gly•Gly•Gly•Gly•Ser
(GGGSG, SEQ ID NO: 33)
Gly•Gly•Gly•Ser•Gly
(GGSGG, SEQ ID NO: 30)
Gly•Gly•Ser•Gly•Gly
(GSGGG, SEQ ID NO: 32)
Gly•Ser•Gly•Gly•Gly
(GSGGS, SEQ ID NO: 27)
Gly•Ser•Gly•Gly•Ser
(SGGGG, SEQ ID NO: 51)
Ser•Gly•Gly•Gly•Gly
(GSSGG, SEQ ID NO: 52)
Gly•Ser•Ser•Gly•Gly
(GSGSG, SEQ ID NO: 31)
Gly•Ser•Gly•Ser•Gly
(SGGSG, SEQ ID NO: 53)
Ser•Gly•Gly•Ser•Gly
(GSSSG, SEQ ID NO: 34)
Gly•Ser•Ser•Ser•Gly
(GGGGGS, SEQ ID NO: 50)
Gly•Gly•Gly•Gly•Gly•Ser
(SGGGGG, SEQ ID NO: 54)
Ser•Gly•Gly•Gly•Gly•Gly
(GGGGGGS, SEQ ID NO: 55)
Gly•Gly•Gly•Gly•Gly•Gly•Ser
(SGGGGGG, SEQ ID NO: 56)
Ser•Gly•Gly•Gly•Gly•Gly•Gly
(GGGGS, SEQ ID NO: 49))n
(Gly•Gly•Gly•Gly•Ser
(SGGGG, SEQ ID NO: 51))n
(Ser•Gly•Gly•Gly•Gly.

[0706] In the present specification, the “association” can refer to, for example, a state where two or more polypeptide regions interact with each other. In general, a hydrophobic bond, a hydrogen bond, an ionic bond, or the like is formed between the intended polypeptide regions to form an association product. As one example of common association, an antibody typified by a native antibody is known to retain a paired structure of a heavy chain variable region (VH) and a light chain variable region (VL) through a noncovalent bond or the like therebetween.

[0707] In some embodiments of the present invention, the inhibiting domain of the carrying moiety is associated with the antigen-binding domain. The inhibiting domain may constitute a portion of the carrying moiety or may constitute the whole of the carrying moiety. From another viewpoint, the inhibiting domain can also be defined as a moiety being associated with the antigen-binding domain, in the carrying moiety.

[0708] In a more specific embodiment, the antigen-binding domain which is a single-domain antibody and the inhibiting domain which is VL, VH or VHH form association as found between antibody VH and antibody VL. In a further specific embodiment, the antigen-binding domain which is a single-domain antibody and the inhibiting domain which is VL, VH or VHH form association as found between antibody VH and antibody VL, and in a state of the association thus formed, the inhibiting domain conformationally inhibits the binding of the antigen-binding domain to the antigen or conformationally changes the antigen-binding site of the antigen-binding domain so that the antigen-binding activity of the single-domain antibody is inhibited by the VL, the VH or the VHH. In an embodiment using VHH as the single-domain antibody, it is considered that the binding of the VHH to the antigen is conformationally inhibited by the inhibiting domain when CDR3, a main antigen-binding site of the VHH, or its neighboring site exists at the interface of association with the inhibiting domain.

[0709] The association of the antigen-binding domain with the inhibiting domain may be canceled, for example, by cleaving the cleavage site. The cancellation of the association can be used interchangeably with, for example, the cancellation of the state where two or more polypeptide regions interact with each other. The interaction between the two or more polypeptide regions may be wholly canceled, or the interaction between the two or more polypeptide regions may be partially canceled.

[0710] In the present specification, the “interface” usually refers to a face at which two regions associate or interact with each other. Amino acid residues forming the interface are usually one or a plurality of amino acid residues contained in each polypeptide region subjected to the association and more preferably refer to amino acid residues that approach each other upon association and participate in interaction. Specifically, the interaction includes noncovalent bonds such as a hydrogen bond, electrostatic interaction, or salt bridge formation between the amino acid residues approaching each other upon association.

[0711] In the present specification, the “amino acid residues forming the interface” specifically refers to amino acid residues contained in polypeptide regions constituting the interface. As one example, the polypeptide regions constituting the interface refer to polypeptide regions responsible for intramolecular or intermolecular selective binding in antibodies, ligands, receptors, substrates, etc. Specific examples of such polypeptide regions in antibodies can include heavy chain variable regions and light chain variable regions. In some embodiments of the present invention, examples of such polypeptide regions can include antigen-binding domains and inhibiting domains.

[0712] Examples of the amino acid residues forming the interface include, but are not limited to, amino acid residues approaching each other upon association. The amino acid residues approaching each other upon association can be found, for example, by analyzing the conformations of polypeptides and examining the amino acid sequences of polypeptide regions forming the interface upon association of the polypeptides.

[0713] In some embodiments of the present invention, an amino acid residue(s) involved in association in the antigen-binding domain, or an amino acid residue(s) involved in association in the inhibiting domain can be altered in order to promote the association of the antigen-binding domain with the inhibiting domain. In a further specific embodiment, an amino acid residue(s) forming the interface with the inhibiting domain, in the antigen-binding domain, or an amino acid residue(s) forming the interface with the antigen-binding domain, in the inhibiting domain can be altered. In a preferred embodiment, the amino acid residue(s) forming the interface can be altered by a method of introducing a mutation(s) to the interface amino acid residue(s) such that two or more amino acid residues forming the interface have different charges. The alteration of the amino acid residue(s) to result in different charges includes the alteration of a positively charged amino acid residue(s) to a negatively charged amino acid residue(s) or an uncharged amino acid residue, the alteration of a negatively charged amino acid residue to a positively charged amino acid residue(s) or an uncharged amino acid residue(s), and the alteration of an uncharged amino acid residue(s) to a positively or negatively charged amino acid residue(s). Such an amino acid alteration is performed for the purpose of promoting the association and is not limited by the position of the amino acid alteration or the type of the amino acid as long as the purpose of promoting the association can be achieved. Examples of the alteration include, but are not limited to, substitution.

[0714] In some embodiments of the present invention, VHH serving as the antigen-binding domain is associated with VL serving as the inhibiting domain. The amino acid residue involved in association with VL, in VHH can refer to, for example, an amino acid residue forming the interface between the VHH and the VL. Examples of the amino acid residue involved in association with VL, in VHH include, but are not limited to, amino acid residues at positions 37, 44, 45, and 47 (J. Mol. Biol. (2005) 350, 112-125). The activity of the VHH is inhibited by promoting the association between the VHH and the VL. Likewise, the amino acid residue involved in association with VHH, in VL can refer to, for example, an amino acid residue forming the interface between the VHH and the VL.

[0715] An amino acid residue involved in the association with VL, in VHH can be altered in order to promote the association between the VHH and the VL. Examples of such an amino acid substitution include, but are not limited to, F37V, Y37V, E44G, Q44G, R45L, H45L, G47W, F47W, L47W, T47W, or/and S47W. Instead of altering each residue in VHH, VHH originally having an amino acid residue 37V, 44G, 45L, or/and 47W may also be used. Instead of the VHH amino acid, an amino acid residue involved in association with VHH, in VL may be altered, and amino acid alterations may also be introduced to both VHH and VL, as long as the purpose of promoting the association between the VHH and the VL can be achieved.

[0716] In some alternative embodiments of the present invention, the antigen-binding domain and the inhibiting domain can be associated with each other by using VHH as the antigen-binding domain and using VH or VHH as the inhibiting domain. An amino acid residue involved in association with VH or VHH serving as the inhibiting domain, in VHH serving as the antigen-binding domain can be identified and altered in order to promote the association of the antigen-binding domain VHH with the inhibiting domain VH or VHH. Also, amino acid residues involved in association with VHH serving as the antigen-binding domain, in VH or VHH serving as the inhibiting domain, can be identified and altered.

[0717] In the case of using a single-domain antibody other than VHH as the antigen-binding domain, amino acid residues involved in association, in the antigen-binding domain or the inhibiting domain can also be identified and altered similarly to above.

[0718] In some embodiments of the present invention, the carrying moiety and the antigen-binding domain are fused via a linker. In a more specific embodiment, the carrying moiety and the antigen-binding domain are fused via a linker containing a cleavage site. In an alternative specific embodiment, the carrying moiety and the antigen-binding domain are fused via a linker, and the fusion protein thus formed contains a cleavage site.

[0719] In another embodiment of the present invention, the carrying moiety and the antigen-binding domain are fused without a linker. In a more specific embodiment, an amino bond is formed between the N-terminal amino acid of the carrying moiety and the C-terminal amino acid of the antigen-binding domain to form a fusion protein. The formed fusion protein contains a cleavage site. In a particular embodiment, one to several N-terminal amino acids of the carrying moiety or/and one to several C-terminal amino acids of the antigen-binding domain are altered, and the N terminus of the carrying moiety and the C terminus of the antigen-binding domain are fused to form a cleavage site near the fusion position. More specifically, the cleavage site can be formed, for example, by converting four C-terminal amino acids of the antigen-binding domain to an LSGR sequence and converting four N-terminal amino acids of the carrying moiety to an SDNH sequence.

[0720] In some embodiments of the present invention, the cleavage site of the polypeptide comprising a carrying moiety and an antigen-binding domain comprises a protease cleavage sequence. The protease cleavage sequence may be placed at any position in the polypeptide as long as the antigen-binding domain is released by protease cleavage and does not lose its antigen-binding activity after the release.

[0721] In some embodiments of the present invention, the carrying moiety comprises an antibody constant region, and the N terminus of the antibody constant region and the C terminus of the antigen-binding domain are fused via a linker or without a linker.

[0722] In a particular embodiment, the protease cleavage sequence is located within the antibody constant region contained in the carrying moiety. In this case, the protease cleavage sequence can be located within the antibody constant region such that the antigen-binding domain is released by protease cleavage. In a specific embodiment, the protease cleavage sequence is located within an antibody heavy chain constant region contained in the carrying moiety, and more specifically located in the antibody heavy chain constant region on the side closer to the antigen-binding domain beyond the amino acid of position 140 (EU numbering), preferably in the antibody heavy chain constant region on the side closer to the antigen-binding domain beyond the amino acid of position 122 (EU numbering). In an alternative specific embodiment, the protease cleavage sequence is located within an antibody light chain constant region contained in the carrying moiety, and more specifically located in the antibody light chain constant region on the side closer to the antigen-binding domain beyond the amino acid of position 130 (EU numbering) (Kabat numbering position 130), preferably in the antibody light chain constant region on the side closer to the antigen-binding domain beyond the amino acid of position 113 (EU numbering) (Kabat numbering position 113).

[0723] In some embodiments of the present invention, the antigen-binding domain is a single-domain antibody, and the C terminus of the single-domain antibody and the N terminus of the carrying moiety are fused via a linker or without a linker.

[0724] In a particular embodiment, the protease cleavage sequence is located within the single-domain antibody. In a more specific embodiment, the single-domain antibody is a single-domain antibody prepared from VH, or from VHH, and the protease cleavage sequence is located in the single-domain antibody on the side closer to the carrying moiety beyond the amino acid of position 35b (Kabat numbering), preferably in the single-domain antibody on the side closer to the carrying moiety beyond the amino acid of position 95 (Kabat numbering), more preferably in the single-domain antibody on the side closer to the carrying moiety beyond the amino acid of position 109 (Kabat numbering). In an alternative specific embodiment, the single-domain antibody is a single-domain antibody prepared from VL, and the protease cleavage sequence is located in the single-domain antibody on the side closer to the carrying moiety beyond the amino acid of position 32 (Kabat numbering), preferably in the single-domain antibody on the side closer to the carrying moiety beyond the amino acid of position 91 (Kabat numbering), more preferably in the single-domain antibody on the side closer to the carrying moiety beyond the amino acid of position 104 (Kabat numbering).

[0725] In some embodiments of the present invention, the carrying moiety comprises an antibody constant region, the antigen-binding domain is a single-domain antibody, and the antibody constant region and the single-domain antibody are fused via a linker or without a linker. In a more specific embodiment, the N terminus of the antibody constant region and the C terminus of the single-domain antibody are fused via a linker or without a linker. In an alternative specific embodiment, the C terminus of the antibody constant region and the N terminus of the single-domain antibody are fused via a linker or without a linker.

[0726] In a particular embodiment, the protease cleavage sequence is located within the antibody constant region contained in the carrying moiety. In a more specific embodiment, the protease cleavage sequence is located in an antibody heavy chain constant region on the side closer to the single-domain antibody beyond the amino acid of position 140 (EU numbering), preferably in an antibody heavy chain constant region on the side closer to the single-domain antibody beyond the amino acid of position 122 (EU numbering). In an alternative specific embodiment, the protease cleavage sequence is located in an antibody light chain constant region on the side closer to the antigen-binding domain beyond the amino acid of position 130 (EU numbering) (Kabat numbering position 130), preferably in an antibody light chain constant region on the side closer to the antigen-binding domain beyond the amino acid of position 113 (EU numbering) (Kabat numbering position 113).

[0727] In a particular embodiment, the protease cleavage sequence is located within the single-domain antibody. In a more specific embodiment, the single-domain antibody is a single-domain antibody prepared from VH, or from VHH, and the protease cleavage sequence is located in the single-domain antibody on the side closer to the antibody constant region beyond the amino acid of position 35b (Kabat numbering), preferably in the single-domain antibody on the side closer to the antibody constant region beyond the amino acid of position 95 (Kabat numbering), more preferably in the single-domain antibody on the side closer to the antibody constant region beyond the amino acid of position 109 (Kabat numbering). In an alternative specific embodiment, the single-domain antibody is a single-domain antibody prepared from VL, and the protease cleavage sequence is located in the single-domain antibody on the side closer to the antibody constant region beyond the amino acid of position 32 (Kabat numbering), preferably in the single-domain antibody on the side closer to the antibody constant region beyond the amino acid of position 91 (Kabat numbering), more preferably in the single-domain antibody on the side closer to the antibody constant region beyond the amino acid of position 104 (Kabat numbering).

[0728] In a particular embodiment, the protease cleavage sequence is located near the boundary between the antigen-binding domain and the carrying moiety. The phrase “near the boundary between the antigen-binding domain and the carrying moiety” refers to a moiety that resides upstream or downstream of the linking site between the antigen-binding domain and the carrying moiety and does not largely influence the secondary structure of the antigen-binding domain.

[0729] In a more specific embodiment, the antigen-binding domain is linked to the antibody constant region contained in the carrying moiety, and the protease cleavage sequence is located near the boundary between the antigen-binding domain and the antibody constant region. The phrase “near the boundary between the antigen-binding domain and the antibody constant region” can refer to near the boundary between the antigen-binding domain and an antibody heavy chain constant region, or near the boundary between the antigen-binding domain and an antibody light chain constant region. When the antigen-binding domain is a single-domain antibody prepared from VH, or from VHH and is connected to an antibody heavy chain constant region, the phrase “near the boundary between the antigen-binding domain and the antibody constant region” can refer to between the amino acid of position 101 (Kabat numbering) of the single-domain antibody and the amino acid of position 140 (EU numbering) of the antibody heavy chain constant region and can preferably refer to between the amino acid of position 109 (Kabat numbering) of the single-domain antibody and the amino acid of position 122 (EU numbering) of the antibody heavy chain constant region. When the antigen-binding domain is a single-domain antibody prepared from VH, or from VHH and is connected to an antibody light chain constant region, the phrase “near the boundary between the antigen-binding domain and the antibody light chain constant region” can refer to between the amino acid of position 101 (Kabat numbering) of the single-domain antibody and the amino acid of position 130 (EU numbering) (Kabat numbering position 130) of the antibody light chain constant region and can preferably refer to between the amino acid of position 109 (Kabat numbering) of the single-domain antibody and the amino acid of position 113 (EU numbering) (Kabat numbering position 113) of the antibody light chain constant region. When the antigen-binding domain is a single-domain antibody prepared from VL, the phrase “near the boundary between the antigen-binding domain and the antibody constant region” refers to between the amino acid of position 96 (Kabat numbering) of the single-domain antibody and the prescribed position of the antibody constant region, preferably between the amino acid of position 104 (Kabat numbering) of the single-domain antibody and the prescribed position of the antibody constant region.

[0730] In some embodiments of the present invention, the polypeptide is an IgG antibody-like molecule. Examples of such embodiments include, but are not limited to: an embodiment in which the carrying moiety comprises an IgG antibody constant region, a single-domain antibody serving as the antigen-binding domain takes the place of VH of an IgG antibody, and the antigen-binding activity is inhibited by VL; an embodiment in which the carrying moiety comprises an IgG antibody constant region, a single-domain antibody serving as the antigen-binding domain takes the place of VL of an IgG antibody, and the antigen-binding activity is inhibited by VH; and an embodiment in which the carrying moiety comprises an IgG antibody constant region, a single-domain antibody serving as the antigen-binding domain takes the place of one of VH and VL of an IgG antibody, and an additional single-domain antibody inhibits the antigen-binding activity of the antigen-binding domain takes the place of the other domain of the IgG antibody.

[0731] The term “IgG antibody-like molecule” used in the present specification is used to define a molecule having moieties substantially similar in structure to constant domains or constant regions as in an IgG antibody, and moieties substantially similar in structure to variable domains or variable regions as in the IgG antibody, and having conformation substantially similar to that of the IgG antibody. In the IgG antibody-like molecule, the domain similar to antibody CH1 and the domain similar to CL may be used interchangeably; that is, as long as interaction similar to the interaction between CH1 and CL of an IgG antibody is present between the domains, the domains linked to the portion similar to the antibody hinge region may be an antibody CH1 domain or an antibody CL domain. However, in the present specification, the “IgG antibody-like molecule” may or may not exert antigen-binding activity while retaining the structures similar to those of the IgG antibody.

[0732] The polypeptide may comprise one or a plurality of antigen-binding domains. One or a plurality of inhibiting domains may inhibit the antigen-binding activity of a plurality of antigen-binding domains. A plurality of antigen-binding domains may each be associated with the inhibiting domain. A plurality of antigen-binding domains may each be fused with the carrying moiety. A plurality of antigen-binding domains may each be capable of being released from the polypeptide. The cleavage site(s) for release of a plurality of antigen-binding domains may be a plurality of cleavage sites corresponding to the number of antigen-binding domains.

[0733] When the polypeptide is an IgG antibody-like molecule, antigen-binding domains may be respectively established at moieties corresponding to two variable regions of the IgG antibody, as shown in FIG. 7. Such an embodiment should be understandable by those skilled in the art with reference to the present invention. The antigen-binding domains incorporated in both arms may have the same antigen-binding specificity or may differ in antigen-binding specificities. Such an embodiment should be understandable by those skilled in the art with reference to the present invention. It is obvious that these embodiments are included in the scope of the present invention.

[0734] In some embodiments of the present invention, the antigen-binding domain is further linked to a second antigen-binding domain. Examples of the second antigen-binding domain include, but are not limited to, single-domain antibodies, antibody fragments, a module called A domain of approximately 35 amino acids contained in an in vivo cell membrane protein avimer (WO2004/044011 and WO2005/040229), adnectin containing a 10Fn3 domain serving as a protein binding domain derived from a glycoprotein fibronectin expressed on cell membranes (WO2002/032925), Affibody containing an IgG binding domain scaffold constituting a three-helix bundle composed of 58 amino acids of protein A (WO1995/001937), DARPins (designed ankyrin repeat proteins) which are molecular surface-exposed regions of ankyrin repeats (AR) each having a 33-amino acid residue structure folded into a subunit of a turn, two antiparallel helices, and a loop (WO2002/020565), anticalin having four loop regions connecting eight antiparallel strands bent toward the central axis in one end of a barrel structure highly conserved in lipocalin molecules such as neutrophil gelatinase-associated lipocalin (NGAL) (WO2003/029462), and a depressed region in the internal parallel sheet structure of a horseshoe-shaped fold composed of repeated leucine-rich-repeat (LRR) modules of an immunoglobulin structure-free variable lymphocyte receptor (VLR) as seen in the acquired immune systems of jawless vertebrates such as lamprey or hagfish (WO2008/016854). In a preferred embodiment, the second antigen-binding domain has antigen-binding specificity different from that of the antigen-binding domain. In a preferred embodiment, the molecular weight of the antigen-binding domain and the second antigen-binding domain linked is 60 kDa or smaller.

[0735] In some more specific embodiments, the antigen-binding domain and the second antigen-binding domain are single-domain antibodies differing in antigen-binding specificities, the antigen-binding domain and the second antigen-binding domain linked are capable of being released from the polypeptide, and the antigen-binding domain and the second antigen-binding domain form a bispecific antigen-binding molecule after release. Examples of such a bispecific antigen-binding molecule include, but are not limited to, a bispecific antigen-binding molecule having an antigen-binding domain specifically binding to the target cell surface antigen and a second antigen-binding domain specifically binding to an immunocyte surface antigen, a bispecific antigen-binding molecule having an antigen-binding domain and a second antigen-binding domain binding to different subunits of the same antigen, and a bispecific antigen-binding molecule having an antigen-binding domain and a second antigen-binding domain binding to different epitopes in the same antigen. Such a bispecific antigen-binding molecule can recruit immunocytes to the vicinity of target cells and is thus considered useful in the treatment of a disease caused by the target cells.

[0736] The antigen-binding activity of the second antigen-binding domain may or may not be inhibited by the carrying moiety. The second antigen-binding domain may or may not be associated with a partial structure of the carrying moiety. Particularly, when the antigen-binding domain and the second antigen-binding domain differ in antigen-binding specificities, the antigen-binding domain in an unreleased state cannot exert antigen-binding activity, as shown in, for example, FIG. 8, even if the antigen-binding activity of the second antigen-binding domain is not inhibited and even if the second antigen-binding domain is not associated with a partial structure of the carrying moiety. This bispecific antigen-binding molecule comprising the antigen-binding domain linked to the second antigen-binding domain cannot exert a function of bispecifically binding to two types of antigens.

[0737] FIG. 8 shows one exemplary form in which the antigen-binding domain is further linked to the second antigen-binding domain.

[0738] In the present specification, the term “specificity” refers to a property by which one of specifically binding molecules does not substantially bind to a molecule other than its one or more binding partner molecules. This term is also used when the antigen-binding domain has specificity for an epitope contained in a particular antigen. The term is also used when the antigen-binding domain has specificity for a particular epitope among a plurality of epitopes contained in an antigen. In this context, the term “not substantially bind” is determined according to the method described in the section about binding activity and means that the binding activity of a specific binding molecule for a molecule other than the binding partner(s) is 80% or less, usually 50% or less, preferably 30% or less, particularly preferably 15% or less, of its binding activity for the binding partner molecule(s).

[0739] The present invention also relates to a pharmaceutical compositions (drugs) comprising the polypeptide of the present invention and a pharmaceutically acceptable carrier.

[0740] The “treatment” (and its grammatically derived words, for example, “treat” and “treating”) used in the present specification means clinical intervention that intends to alter the natural course of an individual to be treated and can be carried out both for prevention and during the course of a clinical pathological condition. The desirable effect of the treatment includes, but is not limited to, the prevention of the development or recurrence of a disease, the alleviation of symptoms, the attenuation of any direct or indirect pathological influence of the disease, the prevention of metastasis, reduction in the rate of progression of the disease, recovery from or alleviation of a disease condition, and ameliorated or improved prognosis. In some embodiments, the polypeptide of the present invention is used for delaying the onset of a disease(s) or delaying the progression of the disease(s).

[0741] In the present invention, the pharmaceutical composition usually refers to a drug for the treatment or prevention of a disease or for examination or diagnosis. In the present invention, the term “pharmaceutical composition comprising the polypeptide” may be used interchangeably with a “method for treating a disease, comprising administering the polypeptide to a subject to be treated” and may be used interchangeably with “use of the polypeptide for the production of a drug for the treatment of a disease”. Also, the term “pharmaceutical composition comprising the polypeptide” may be used interchangeably with “use of the polypeptide for treating a disease”.

[0742] The pharmaceutical compositions of the present invention can be formulated by use of a method known to those skilled in the art. For example, the pharmaceutical compositions can be parenterally used in an injection form of a sterile solution or suspension with water or any of other pharmaceutically acceptable liquids. The pharmaceutical compositions can be formulated, for example, by appropriately combining the polypeptide with a pharmacologically acceptable carrier or medium, specifically, sterile water or physiological saline, a plant oil, an emulsifier, a suspending agent, a surfactant, a stabilizer, a flavoring agent, an excipient, a vehicle, an antiseptic, a binder, etc. and mixing them into a unit dosage form required for generally accepted pharmaceutical practice. The amount of the active ingredient in these formulations is set so as to give an appropriate volume in a prescribed range.

[0743] A sterile composition for injection can be formulated according to usual pharmaceutical practice using a vehicle such as injectable distilled water. Examples of the injectable aqueous solution include isotonic solutions containing physiological saline, glucose, or other adjuvants (e.g., D-sorbitol, D-mannose, D-mannitol, and sodium chloride). The aqueous solution can be used in combination with an appropriate solubilizer, for example, an alcohol (ethanol, etc.), a polyalcohol (propylene glycol, polyethylene glycol, etc.), or a nonionic surfactant (Polysorbate 80™, HCO-50, etc.).

[0744] Examples of the oil solution include sesame oil and soybean oil. The oil solution can also be used in combination with benzyl benzoate and/or benzyl alcohol as a solubilizer. The oil solution can be supplemented with a buffer (e.g., a phosphate buffer solution and a sodium acetate buffer solution), a soothing agent (e.g., procaine hydrochloride), a stabilizer (e.g., benzyl alcohol and phenol), and an antioxidant. The prepared injection solution is usually filled into an appropriate ampule.

[0745] The pharmaceutical composition of the present invention is preferably administered through a parenteral route. For example, a composition having an injection, transnasal, transpulmonary, or percutaneous dosage form is administered. The pharmaceutical composition can be administered systemically or locally by, for example, intravenous injection, intramuscular injection, intraperitoneal injection, or subcutaneous injection.

[0746] The administration method can be appropriately selected according to the age and symptoms of a patient. The dose of the pharmaceutical composition containing the polypeptide can be set to the range of, for example, 0.0001 mg to 1000 mg per kg body weight per dose. Alternatively, the dose of the pharmaceutical composition containing the polypeptide can be set to a dose of, for example, 0.001 mg to 100000 mg per patient. However, the present invention is not necessarily limited by these numerical values. Although the dose and the administration method vary depending on the body weight, age, symptoms, etc. of a patient, those skilled in the art can set an appropriate dose and administration method in consideration of these conditions.

[0747] The present invention also relates to methods for producing a polypeptide comprising a carrying moiety having an inhibiting domain, and an antigen-binding domain.

[0748] One method for producing the polypeptide of the present invention is a method comprising: obtaining an antigen-binding domain having antigen-binding activity; linking the antigen-binding domain to a carrying moiety such that the antigen-binding activity of the antigen-binding domain is inhibited by an inhibiting domain, to form a polypeptide precursor; and further inserting a cleavage site into the polypeptide precursor or altering a portion of the polypeptide precursor to a cleavage site. The method for introducing the cleavage site can be any of the insertion of the cleavage site and the alteration of a portion of the polypeptide precursor as long as the cleavage site can be introduced into the polypeptide precursor. Alternatively, an alteration site may be introduced into the polypeptide precursor by the combination of both the approaches. Such an embodiment should be obvious to those skilled in the art with reference to the present specification and is included in the scope of the present invention.

[0749] Another method for producing the polypeptide of the present invention is a method comprising: obtaining an antigen-binding domain having antigen-binding activity; and linking the antigen-binding domain to a carrying moiety via a cleavage site such that the antigen-binding activity of the antigen-binding domain is inhibited by an inhibiting domain, to form a polypeptide. When the antigen-binding domain is linked to the carrying moiety via a cleavage site, the cleavage site may be sandwiched between the antigen-binding domain and the carrying moiety, or a portion of the antigen-binding domain or/and a portion of the carrying moiety may be altered and used as a portion of the cleavage site.

[0750] To “insert” amino acid sequence A into amino acid sequence B refers to splitting amino acid sequence B into two parts without deletion, and linking the two parts with amino acid sequence A (that is, producing such an amino acid sequence as “first half of amino acid sequence B-amino acid sequence A-second half of amino acid sequence B”). To “introduce” amino acid sequence A into amino acid sequence B refers to splitting amino acid sequence B into two parts and linking the two parts with amino acid sequence A. This encompasses not only “inserting” amino acid sequence A into amino acid sequence B as mentioned above, but also linking the two parts with amino acid sequence A after deleting one or a plurality of amino acid residues of amino acid sequence B including those adjacent to amino acid sequence A (that is, replacing a portion of amino acid sequence B with amino acid sequence A).

[0751] In an embodiment using a single-domain antibody as the antigen-binding domain and using a protease cleavage sequence as the cleavage site, the methods for producing the polypeptide will be described below.

[0752] In one embodiment of the present invention, the method for producing a polypeptide comprising a carrying moiety having an inhibiting domain, and an antigen-binding domain is a production method comprising the following steps:
[0753] (a) obtaining a single-domain antibody binding to a target antigen;
[0754] (b) linking the single-domain antibody obtained in the step (a) to a carrying moiety such that the antigen-binding activity of the single-domain antibody is inhibited by an inhibiting domain of the carrying moiety, to form a polypeptide precursor; and
[0755] (c) introducing a protease cleavage sequence into the polypeptide precursor.

[0756] In one embodiment of the present invention, the method for producing a polypeptide comprising a carrying moiety having an inhibiting domain, and an antigen-binding domain is a production method comprising the following steps:
[0757] (a) obtaining a single-domain antibody binding to a target antigen;
[0758] (b) linking the single-domain antibody obtained in the step (a) to a carrying moiety such that the antigen-binding activity of the single-domain antibody is inhibited by an inhibiting domain of the carrying moiety, to form a polypeptide precursor; and
[0759] (c) introducing a protease cleavage sequence to near the boundary between the single-domain antibody and the carrying moiety.

[0760] In one embodiment of the present invention, the method for producing a polypeptide comprising a carrying moiety having an inhibiting domain, and an antigen-binding domain is a production method comprising the following steps:
[0761] (a) obtaining a single-domain antibody binding to a target antigen; and
[0762] (b) linking the single-domain antibody obtained in the step (a) to the carrying moiety via a protease cleavage sequence such that the antigen-binding activity of the single-domain antibody is inhibited by an inhibiting domain of the carrying moiety, to form a polypeptide.

[0763] In a particular embodiment, the method for producing a polypeptide comprising a carrying moiety having an inhibiting domain, and an antigen-binding domain is the production method further comprising the following step:
[0764] (d) confirming that the binding activity of the single-domain antibody incorporated into the polypeptide or into the polypeptide precursor against the target antigen is weakened or lost.

[0765] In the present invention, the phrase “binding activity is weakened” means that the binding activity against the target antigen is decreased as compared with that before the linking, and the degree of this decrease is not limited.

[0766] In a particular embodiment, the method for producing a polypeptide comprising a carrying moiety having an inhibiting domain, and an antigen-binding domain is the production method further comprising the following step:
[0767] (e) releasing the single-domain antibody by the protease cleavage of the protease cleavage sequence and confirming that the released single-domain antibody binds to the antigen.

[0768] In one embodiment of the present invention, the method for producing a polypeptide which is an IgG antibody-like molecule comprising a carrying moiety having an inhibiting domain, and an antigen-binding domain is a production method comprising the following steps:
[0769] (a) obtaining a single-domain antibody binding to a target antigen;
[0770] (b) allowing the single-domain antibody obtained in the step (a) to be associated with a VL as a substitute for VH of an IgG antibody, or allowing the single-domain antibody to be associated with a VH as a substitute for VL of an IgG antibody such that the antigen-binding activity of the single-domain antibody is inhibited, to form an IgG antibody-like molecule precursor harboring the single-domain antibody; and
[0771] (c) introducing a protease cleavage sequence into the IgG antibody-like molecule precursor harboring the single-domain antibody.

[0772] In one embodiment of the present invention, the method for producing a polypeptide which is an IgG antibody-like molecule comprising a carrying moiety having an inhibiting domain, and an antigen-binding domain is a production method comprising the following steps:
[0773] (a) obtaining a single-domain antibody binding to a target antigen;
[0774] (b) allowing the single-domain antibody obtained in the step (a) to be associated with a VL as a substitute for VH of an IgG antibody, or allowing the single-domain antibody to be associated with a VH as a substitute for VL of an IgG antibody such that the antigen-binding activity of the single-domain antibody is inhibited, to form an IgG antibody-like molecule precursor harboring the single-domain antibody; and
[0775] (c) introducing a protease cleavage sequence to near the boundary between the single-domain antibody and an antibody constant region in the IgG antibody-like molecule precursor.

[0776] In one embodiment of the present invention, the method for producing a polypeptide which is an IgG antibody-like molecule comprising a carrying moiety having an inhibiting domain, and an antigen-binding domain is a production method comprising the following steps:
[0777] (a) obtaining a single-domain antibody binding to a target antigen; and
[0778] (b) linking the single-domain antibody obtained in the step (a) as a substitute for IgG antibody VH or VL to an IgG antibody heavy chain constant region or light chain constant region via a protease cleavage sequence such that the antigen-binding activity of the single-domain antibody is inhibited, to form an IgG antibody-like molecule harboring the single-domain antibody.

[0779] In a particular embodiment, the method for producing a polypeptide which is an IgG antibody-like molecule comprising a carrying moiety having an inhibiting domain, and an antigen-binding domain is the production method further comprising the following step:
[0780] (d) confirming that the binding activity of the single-domain antibody introduced into the IgG antibody-like molecule or into the IgG antibody-like molecule precursor against the target antigen is weakened or lost.

[0781] In the present invention, the phrase “binding activity is weakened” means that the binding activity against the target antigen is decreased as compared with that before the association or the linking, and the degree of this decrease is not limited.

[0782] In a particular embodiment, the method for producing a polypeptide which is an IgG antibody-like molecule comprising a carrying moiety having an inhibiting domain, and an antigen-binding domain is the production method further comprising the following step:
[0783] (e) releasing the single-domain antibody by the protease cleavage of the protease cleavage sequence and confirming that the released single-domain antibody binds to the target antigen.

[0784] In the case of using VH, VL or VHH as the inhibiting domain, the method for inhibiting the antigen-binding activity of the single-domain antibody by the inhibiting domain of the carrying moiety includes a method of allowing the single-domain antibody to be associated with VH, VL or VHH. The VH, the VL or the VHH that inhibits the antigen-binding activity of the provided single-domain antibody can be screened for by allowing known VH, VL or VHH to be associated with the single-domain antibody and comparing the antigen-binding activity of the single-domain antibody between before and after the association.

[0785] In another method for inhibiting the antigen-binding activity of the single-domain antibody by particular VH, VL or VHH, an amino acid residue involved in association with VH, VL or VHH, in the single-domain antibody can be substituted to promote the association, or a single-domain antibody/inhibiting domain pair having the desired level of difference in antigen-binding activity between before and after the association can also be provided by using a single-domain antibody originally having, as such an amino acid residue,
[0786] an amino acid that can promote the association.

[0787] In one embodiment of the present invention, the method for producing a polypeptide which is an IgG antibody-like molecule comprising a carrying moiety having an inhibiting domain, and an antigen-binding domain is a production method comprising the following steps:
[0788] (a) substituting an amino acid residue in a single-domain antibody that is involved in association with antibody VH, or substituting an amino acid residue in a single-domain antibody that is involved in association with antibody VL to prepare a variant single-domain antibody retaining the binding activity of the single-domain antibody against the target antigen;
[0789] (b) allowing the variant single-domain antibody prepared in the step (a) to be associated with antibody VH, or allowing the variant single-domain antibody to be associated with antibody VL such that the antigen-binding activity of the variant single-domain antibody is inhibited, to form an IgG antibody-like molecule precursor harboring the variant single-domain antibody; and
[0790] (c) introducing a protease cleavage sequence into the IgG antibody-like molecule precursor harboring the variant single-domain antibody.

[0791] In one embodiment of the present invention, the method for producing a polypeptide which is an IgG antibody-like molecule comprising a carrying moiety having an inhibiting domain, and an antigen-binding domain is a production method comprising the following steps:
[0792] (a) substituting an amino acid residue in a single-domain antibody that is involved in association with antibody VH, or substituting an amino acid residue in a single-domain antibody that is involved in association with antibody VL, to prepare a variant single-domain antibody retaining the binding activity of the single-domain antibody against the target antigen;
[0793] (b) allowing the variant single-domain antibody prepared in the step (a) to be associated with antibody VH, or allowing the variant single-domain antibody to be associated with antibody VL such that the antigen-binding activity of the variant single-domain antibody is inhibited, to form an IgG antibody-like molecule precursor harboring the variant single-domain antibody; and
[0794] (c) introducing a protease cleavage sequence to near the boundary between the variant single-domain antibody and a constant region in the IgG antibody-like molecule precursor.

[0795] In one embodiment of the present invention, the method for producing a polypeptide which is an IgG antibody-like molecule comprising a carrying moiety having an inhibiting domain, and an antigen-binding domain is a production method comprising the following steps:
[0796] (a) substituting an amino acid residue in a single-domain antibody that is involved in association with antibody VH, or substituting an amino acid residue in a single-domain antibody that is involved in association with antibody VL, to prepare a variant single-domain antibody retaining the binding activity of the single-domain antibody against the target antigen; and
[0797] (b) linking the variant single-domain antibody prepared in the step (a) to an IgG antibody heavy chain constant region via a protease cleavage sequence, or linking the variant single-domain antibody to an IgG antibody light chain constant region via a protease cleavage sequence such that the antigen-binding activity of the variant single-domain antibody is inhibited, to form an IgG antibody-like molecule harboring the variant single-domain antibody.

[0798] In a particular embodiment, the method for producing a polypeptide which is an IgG antibody-like molecule comprising a carrying moiety having an inhibiting domain, and an antigen-binding domain is the production method further comprising the following step:
[0799] (d) confirming that the binding activity of the variant single-domain antibody harbored in the IgG antibody-like molecule or the IgG antibody-like molecule precursor against the target antigen is weakened or lost.

[0800] In the present invention, the phrase “binding activity is weakened” means that the binding activity against the target antigen is decreased as compared with that before the association or the linking, and the degree of this decrease is not limited.

[0801] In a particular embodiment, the method for producing a polypeptide which is an IgG antibody-like molecule comprising a carrying moiety having an inhibiting domain, and an antigen-binding domain is the production method further comprising the following step:
[0802] (e) releasing the variant single-domain antibody by the protease cleavage of the protease cleavage sequence and confirming that the released variant single-domain antibody binds to the target antigen.

[0803] The present invention also relates to polynucleotides each encoding the polypeptide comprising a carrying moiety having an inhibiting domain, and an antigen-binding domain.

[0804] The polynucleotide according to the present invention is usually carried by (or inserted into) an appropriate vector and transfected into host cells. The vector is not particularly limited as long as the vector can stably retain an inserted nucleic acid. For example, when E. coli is used as the host, a pBluescript vector (manufactured by Stratagene Corp.) or the like is preferred as a vector for cloning. Various commercially available vectors can be used. In the case of using the vector for the purpose of producing the polypeptide of the present invention, an expression vector is particularly useful. The expression vector is not particularly limited as long as the vector permits expression of the polypeptide in vitro, in E. coli, in cultured cells, or in organism individuals. The expression vector is preferably, for example, a pBEST vector (manufactured by Promega Corp.) for in vitro expression, a pET vector (manufactured by Invitrogen Corp.) for E. coli, a pME18S-FL3 vector (GenBank Accession No. AB009864) for cultured cells, and a pME18S vector (Mol Cell Biol. 8: 466-472 (1988)) for organism individuals. The insertion of the DNA of the present invention into the vector can be performed by a routine method, for example, ligase reaction using restriction sites (Current protocols in Molecular Biology edit. Ausubel et al. (1987) Publish. John Wiley & Sons. Section 11.4-11.11).

[0805] The host cells are not particularly limited, and various host cells are used according to the purpose. Examples of the cells for expressing the polypeptide can include bacterial cells (e.g., Streptococcus, Staphylococcus, E. coli, Streptomyces, and Bacillus subtilis), fungal cells (e.g., yeasts and Aspergillus), insect cells (e.g., Drosophila S2 and Spodoptera SF9), animal cells (e.g., CHO, COS, HeLa, C127, 3T3, BHK, HEK293, and Bowes melanoma cells) and plant cells. The transfection of the vector to the host cells may be performed by a method known in the art, for example, a calcium phosphate precipitation method, an electroporation method (Current protocols in Molecular Biology edit. Ausubel et al., (1987) Publish. John Wiley & Sons. Section 9.1-9.9), a Lipofectamine method (manufactured by GIBCO-BRL), or a microinjection method.

[0806] An appropriate secretory signal can be incorporated into the polypeptide of interest in order to secrete the polypeptide expressed in the host cells to the lumen of the endoplasmic reticulum, periplasmic space, or an extracellular environment. The signal may be endogenous to the polypeptide of interest or may be a foreign signal.

[0807] When the polypeptide of the present invention is secreted into a medium, the recovery of the polypeptide in the production method is performed by the recovery of the medium. When the polypeptide of the present invention is produced in cells, the cells are first lysed, followed by the recovery of the polypeptide.

[0808] Methods known in the art including ammonium sulfate or ethanol precipitation, acid extraction, anion- or cation-exchange chromatography, phosphocellulose chromatography, hydrophobic interaction chromatography, affinity chromatography, hydroxyapatite chromatography, and lectin chromatography can be used for recovering and purifying the polypeptide of the present invention from the recombinant cell culture.

[0809] Examples of the antigen-binding domain used in some embodiments of the present invention include a single-domain antibody. In these embodiments, the antigen-binding activity of the single-domain antibody can be inhibited by its association with particular VL, by its association with particular VH, or by its association with particular VHH. The present invention also relates to methods for screening for such single-domain antibodies.

[0810] VL, VH or VHH having a known sequence, for example, VL, VH or VHH having a sequence registered in the IMGT or Kabat database, can be used as the VL, the VH or the VHH that inhibits the antigen-binding activity of the single-domain antibody. Also, a VL, VH or VHH sequence newly identified from a human antibody library or the like can be used. The VL, the VH or the VHH that inhibits the binding activity of the single-domain antibody can be selected by preparing a protein by the combination of these sequences and measuring the binding activity by use of the method described above.

[0811] In some embodiments of the present invention, VL, VH or VHH having a human antibody germline sequence can be used as the VL, the VH or the VHH that inhibits the antigen-binding activity of the single-domain antibody. In the case of using, for example, VL as the inhibiting domain, VL having kappa chain framework sequences or VL having lambda chain framework sequences can be used. Also, VL having modified framework sequences such as combined framework sequences of kappa chain and lambda chain framework sequences can be used.

[0812] In one embodiment, the present invention provides a method for screening for a single-domain antibody whose antigen-binding activity can be inhibited by its association with particular VL, comprising the following steps:
[0813] (a) obtaining a single-domain antibody having target antigen-binding activity;
[0814] (b) allowing the single-domain antibody obtained in the step (a) to be associated with a particular VL; and
[0815] (c) confirming that the binding activity of the single-domain antibody associated with the particular VL in the step (b) against the antigen is weakened or lost.

[0816] In the present invention, the phrase “binding activity is weakened” means that the binding activity against the target antigen is decreased as compared with that before the association, and the degree of this decrease is not limited.

[0817] In one embodiment, the present invention provides a method for screening for a single-domain antibody whose antigen-binding activity can be inhibited by its association with particular VH, comprising the following steps:
[0818] (a) obtaining a single-domain antibody having target antigen-binding activity;
[0819] (b) allowing the single-domain antibody obtained in the step (a) to be associated with a particular VH; and
[0820] (c) confirming that the binding activity of the single-domain antibody associated with the particular VH in the step (b) against the antigen is weakened or lost.

[0821] In the present invention, the phrase “binding activity is weakened” means that the binding activity against the target antigen is decreased as compared with that before the association, and the degree of this decrease is not limited.

[0822] In one embodiment, the present invention provides a method for screening for a single-domain antibody whose antigen-binding activity can be inhibited by its association with particular VHH, comprising the following steps:
[0823] (a) obtaining a single-domain antibody having target antigen-binding activity;
[0824] (b) allowing the single-domain antibody obtained in the step (a) to be associated with a particular VHH; and
[0825] (c) confirming that the binding activity of the single-domain antibody associated with the particular VHH in the step (b) against the antigen is weakened or lost.

[0826] In the present invention, the phrase “binding activity is weakened” means that the binding activity against the target antigen is decreased as compared with that before the association, and the degree of this decrease is not limited.

[0827] Examples of the method for allowing the single-domain antibody to be associated with the particular VL, VH or VHH include a method of designing a molecule having the sequence of the single-domain antibody as a substitute for the sequence of one of VH and VL in an antibody or an antibody fragment comprising both VH and VL, such as an intact antibody, Fab, Fab′, or (Fab)2, and expressing a polypeptide having the sequence.

[0828] The present invention also relates to a method for producing a single-domain antibody whose antigen-binding activity is inhibited by promoting the association of the single-domain antibody with particular VL, by promoting the association of the single-domain antibody with particular VH, or by promoting the association of the single-domain antibody with particular VHH, in addition to screening for a single-domain antibody whose antigen-binding activity is inhibited by its association with particular VL, by its association with particular VH, or by its association with particular VHH.

[0829] In one embodiment, the present invention provides a method for producing a single-domain antibody whose antigen-binding activity is inhibited by its association with particular VL, comprising the following step:
[0830] (a) substituting an amino acid residue in a single-domain antibody that is involved in association with antibody VL, to prepare a variant single-domain antibody retaining the binding activity of the single-domain antibody against the target antigen.

[0831] In a particular embodiment, the present invention provides the method for producing a single-domain antibody whose antigen-binding activity is inhibited by its association with particular VL, further comprising the following steps:
[0832] (b) allowing the variant single-domain antibody prepared in the step (a) to be associated with the particular VL; and
[0833] (c) confirming that the antigen-binding activity of the variant single-domain antibody associated with the VL is weakened or lost.

[0834] In the present invention, the phrase “binding activity is weakened” means that the binding activity against the target antigen is decreased as compared with that before the association, and the degree of this decrease is not limited.

[0835] In one embodiment, the present invention provides a method for producing a single-domain antibody whose antigen-binding activity is inhibited by its association with particular VH, comprising the following step:
[0836] (a) substituting an amino acid residue in a single-domain antibody that is involved in association with antibody VH, to prepare a variant single-domain antibody retaining the binding activity of the single-domain antibody against the target antigen.

[0837] In a particular embodiment, the present invention provides the method for producing a single-domain antibody whose antigen-binding activity is inhibited by its association with particular VH, further comprising the following steps:
[0838] (b) allowing the variant single-domain antibody prepared in the step (a) to be associated with the particular VH; and
[0839] (c) confirming that the antigen-binding activity of the variant single-domain antibody associated with the VH is weakened or lost.

[0840] In the present invention, the phrase “binding activity is weakened” means that the binding activity against the target antigen is decreased as compared with that before the association, and the degree of this decrease is not limited.

[0841] In one embodiment, the present invention provides a method for producing a single-domain antibody whose antigen-binding activity is inhibited by its association with particular VHH, comprising the following step:
[0842] (a) substituting an amino acid residue in a single-domain antibody that is involved in association with VHH, to prepare a variant single-domain antibody retaining the binding activity of the single-domain antibody against the target antigen.

[0843] In a particular embodiment, the present invention provides the method for producing a single-domain antibody whose antigen-binding activity is inhibited by its association with particular VHH, further comprising the following steps:
[0844] (b) allowing the variant single-domain antibody prepared in the step (a) to be associated with the particular VHH; and
[0845] (c) confirming that the antigen-binding activity of the variant single-domain antibody associated with the VHH is weakened or lost.

[0846] In the present invention, the phrase “binding activity is weakened” means that the binding activity against the target antigen is decreased as compared with that before the association, and the degree of this decrease is not limited.

[0847] The step of allowing association of the single-domain antibody with the particular VL, VH or VHH is performed by a method of designing a molecule having the sequence of the single-domain antibody as a substitute for the sequence of one of VH and VL in an antibody or an antibody fragment comprising both VH and VL, such as an intact antibody, Fab, Fab′, or (Fab)2, and expressing a polypeptide having the sequence.

[0848] According to a certain embodiment of the present invention, the single-domain antibody of the present invention whose antigen-binding activity is inhibited or lost by its association with particular VL, VH or VHH can be obtained from a library comprising a plurality of fusion polypeptides of single-domain antibodies each linked to a first association sustaining domain.

[0849] In the present specification, an embodiment of the “library” can provide a library that permits efficient obtainment of a single-domain antibody whose antigen-binding activity is inhibited or lost by its association with particular VL, VH or VHH.

[0850] In the present specification, the “library” refers to a set of a plurality of fusion polypeptides having different sequences, or a set of nucleic acids or polynucleotides encoding these fusion polypeptides. A plurality of fusion polypeptides contained in the library are fusion polypeptides differing in sequence from each other, not having a single sequence.

[0851] In the present specification, the term “differing in sequence from each other” in a plurality of fusion polypeptides differing in sequence from each other means that the individual fusion polypeptides in the library have distinct sequences. More preferably, the term means that the single-domain antibody moieties of the individual fusion polypeptides in the library have distinct sequences. Specifically, the number of the distinct sequences in the library reflects the number of independent clones differing in sequences in the library and is also referred to as a “library size”. The library size of a usual phage display library is 106 to 1012 and may be expanded to 1014 by the application of a technique known in the art such as a ribosome display method. However, the actual number of phage particles for use in panning selection for the phage library is usually 10 to 10,000 times larger than the library size. This excessive multiple, also called the “number of equivalents of the library”, represents that 10 to 10,000 individual clones may have the same amino acid sequence. Accordingly, the term “differing in sequence from each other” according to the present invention means that the individual polypeptides in the library excluding the number of equivalents of the library have distinct sequences and more specifically means that the library has 106 to 1014 molecules, preferably 107 to 1012 molecules, of polypeptides differing in sequence from each other.

[0852] The term “plurality of” in the library consisting essentially of a plurality of fusion polypeptides according to the present invention usually refers to a set of two or more types of substances as to, for example, the polypeptide, polynucleotide molecule, vector, or virus of the present invention. Provided that, for example, two or more substances differ in particular trait from each other, this means that the substances are of two or more types. Examples thereof can include a mutant amino acid observed at a particular amino acid position in an amino acid sequence. For example, two or more polypeptides of the present invention having substantially the same, preferably identical sequences, except for particular mutant amino acids at surface-exposed, highly diverse amino acid positions are regarded as a plurality of polypeptides of the present invention. In another example, two or more polynucleotide molecules of the present invention having substantially the same, preferably identical sequences except for bases encoding particular mutant amino acids at surface-exposed, highly diverse amino acid positions are regarded as a plurality of polynucleotide molecules of the present invention.

[0853] Panning methods that utilize phage vectors are also preferably used as a method for screening the fusion polypeptides with binding activity as an index. A gene encoding each single-domain antibody and a gene encoding an IgG antibody CH1 domain or a light chain constant region can be linked in an appropriate form to forma fusion polypeptide. Genes encoding the fusion polypeptides thus formed can be inserted into phage vectors to obtain phages expressing the fusion polypeptides on the surface. After contact of the phages with the desired antigen, phages bound with the antigen can be recovered to recover DNAs encoding fusion polypeptides having the binding activity of interest. This operation can be repeated, if necessary, to enrich fusion polypeptides having the desired binding activity.

[0854] In addition to the phage display method, a technique using a cell-free translation system, a technique of presenting fusion polypeptides on cell or virus surface, a technique of using an emulsion, and the like are known as techniques of obtaining fusion polypeptides by panning using a library. For example, a ribosome display method of forming a complex of mRNA and a translated protein via ribosome by the removal of a stop codon, etc., a cDNA or mRNA display method of covalently binding a gene sequence to a translated protein using a compound such as puromycin, or a CIS display method of forming a complex of a gene and a translated protein using a nucleic acid binding protein can be used as the technique using a cell-free translation system. For example, the phage display method as well as an E. coli display method, a gram-positive bacterium display method, a yeast display method, a mammalian cell display method, or a virus display method can be used as the technique of presenting fusion polypeptides on cell or virus surface. For example, an in vitro virus display method using an emulsion containing a gene and a translation-related molecule can be used as the technique using an emulsion. These methods are already known in the art (Nat Biotechnol. 2000 December; 18(12): 1287-92, Nucleic Acids Res. 2006; 34(19): e127, Proc Natl Acad Sci USA. 2004 Mar. 2; 101(9): 2806-10, Proc Natl Acad Sci USA. 2004 Jun. 22; 101(25): 9193-8, Protein Eng Des Sel. 2008 April; 21(4): 247-55, Proc Natl Acad Sci USA. 2000 Sep. 26; 97(20): 10701-5, MAbs. 2010 September-October; 2(5): 508-18, Methods Mol Biol. 2012; 911: 183-98).

[0855] An association partner of an inhibiting domain linked to a second association sustaining domain can be used in a method for obtaining the single-domain antibody of interest from the library comprising a plurality of fusion polypeptides of single-domain antibodies each linked to a first association sustaining domain.

[0856] In the present specification, the “first association sustaining domain” and the “second association sustaining domain” refer to domains that can interact with each other through a bond such as a hydrophobic bond, a hydrogen bond, or an ionic bond to form an association product. Preferred examples of the first association sustaining domain and the second association sustaining domain include, but are not limited to, antibody light chain constant regions (CL) and CH1 domains of heavy chain constant regions.

[0857] The first association sustaining domain and the second association sustaining domain can interact with each other and form the association of the fusion polypeptide with the association partner, regardless of the degree of associativity between the single-domain antibody and the inhibiting domain.

[0858] In an alternative embodiment, the present invention provides a library comprising a plurality of fusion polypeptides of single-domain antibodies linked to an IgG antibody light chain constant region, wherein the single-domain antibodies include a single-domain antibody whose antigen-binding activity is inhibited or lost by its association with particular VL, VH or VHH, and a method for screening the library for a single-domain antibody whose antigen-binding activity can be inhibited or could lost by association with particular VL, VH or VHH.

[0859] In a specific embodiment, as shown in FIGS. 9A(1), 9A(2), 9A(3), 9B, and 9C,
[0860] (1) fusion polypeptides of single-domain antibodies each linked to a first association sustaining domain are displayed on the surface of phages or the like by a display method such as phage display.
[0861] (2) An association partner of an inhibiting domain linked to a second association sustaining domain is provided, and the fusion polypeptides are associated with the association partner. A fusion polypeptide that does not bind to the target antigen or has antigen-binding activity of a predetermined value or lower in this state of the fusion polypeptide associated with the association partner is selected.
[0862] (3) The association of the single-domain antibody in the fusion polypeptide selected in (2) with the inhibiting domain in the association partner is canceled. A fusion polypeptide that binds to the target antigen or has antigen-binding activity of a predetermined value or higher in a state where the single-domain antibody is not associated with the inhibiting domain is selected.

[0863] In this context, for example, a method of cleaving the association partner near the boundary between the inhibiting domain and the second association sustaining domain as shown in FIG. 9B, or a method of cleaving the fusion polypeptide near the boundary between the single-domain antibody and the first association sustaining domain as shown in FIG. 9C can be used as a method for canceling the association of the single-domain antibody with the inhibiting domain.

[0864] In a further embodiment, the present invention provides a method comprising, as shown in FIG. 9D, comparing the difference in the binding activity of the single-domain antibody between when the single-domain antibody and the inhibiting domain are expressed together and when the single-domain antibody is expressed so as not to express the inhibiting domain together therewith, instead of comparing the difference in the binding activity of the single-domain antibody between the canceled association and non-canceled association of the single-domain antibody with the inhibiting domain as shown in FIGS. 9A to 9C.

[0865] As shown in FIG. 9D(1), the single-domain antibody and the inhibiting domain are expressed together to form association. A fusion polypeptide comprising a single-domain antibody that does not bind to the antigen or has antigen-binding activity of a predetermined value or lower in this state is selected. As shown in FIGS. 9D(2), 9D(2′), and 9D(2″), the single-domain antibody is expressed so as not to express the inhibiting domain together therewith. A fusion polypeptide comprising a single-domain antibody that binds to the antigen or has antigen-binding activity of a predetermined value or higher in this state is selected. As a result, the single-domain antibody whose antigen-binding activity is inhibited or lost by its association with a particular inhibiting domain, for example, VH, VL or VHH may be screened for from the library comprising a plurality of fusion polypeptides of single-domain antibodies each linked to a first association sustaining domain.

[0866] Alternatively, the single-domain antibody is expressed so as not to express the inhibiting domain together therewith. A polypeptide comprising a single-domain antibody that binds to the antigen or has antigen-binding activity of a predetermined value or higher in this state is selected. Then, the single-domain antibody and the inhibiting domain are expressed together to form association. A polypeptide comprising a single-domain antibody that does not bind to the antigen or has antigen-binding activity of a predetermined value or lower in this state is selected. By this method as well, the single-domain antibody whose antigen-binding activity is inhibited or lost by its association with a particular inhibiting domain, for example, VH, VL or VHH may be screened for from the library comprising a plurality of fusion polypeptides of single-domain antibodies each linked to a first association sustaining domain. Alternatively, as shown in FIGS. 9D(2), 9D(2′), and 9D(2″), the single-domain antibody is expressed so as not to express the inhibiting domain together therewith (only the single-domain antibody is expressed; only the fusion polypeptide comprising a single-domain antibody and a first association sustaining domain is expressed; or the fusion polypeptide comprising a single-domain antibody and a first association sustaining domain is associated only with the second association sustaining domain), and a fusion polypeptide comprising a single-domain antibody that binds to the antigen or has antigen-binding activity of a predetermined value or higher in this state is selected. Then, as shown in FIG. 9D(1), the single-domain antibody in the selected fusion polypeptide and the inhibiting domain are expressed together to form association. A fusion polypeptide comprising a single-domain antibody that does not bind to the antigen or has antigen-binding activity of a predetermined value or lower in this state is selected. As a result, the single-domain antibody whose antigen-binding activity is inhibited or lost by its association with a particular inhibiting domain, for example, VH, VL or VHH may also be screened for from the library comprising a plurality of fusion polypeptides of single-domain antibodies each linked to a first association sustaining domain.

[0867] The “antigen-binding activity of a predetermined value or lower” can refer to, for example, antigen-binding activity that falls below a predetermined reference when the antigen-binding activity is measured by the method listed in the present specification. Likewise, the “antigen-binding activity of a predetermined value or higher” can refer to, for example, antigen-binding activity that exceeds a predetermined reference when the antigen-binding activity is measured by the method listed in the present specification. A fusion polypeptide having the antigen-binding activity of a predetermined value or higher binds more strongly to the antigen than a fusion polypeptide having the antigen-binding activity of a predetermined value or lower.

[0868] The fusion polypeptide selected in (3) described above comprises a single-domain antibody that has no or weak antigen-binding activity in a state of association with the inhibiting domain and has (or has strong) antigen-binding activity in a state of non-association with the inhibiting domain. The sequence of the fusion polypeptide selected by such a method can be analyzed to also elucidate the sequence of the single-domain antibody contained therein. Thus, the single-domain antibody can be produced.

[0869] For the methods for screening for a fusion polypeptide comprising the single-domain antibody of interest by using fusion polypeptides and an association partner, it is important to compare the antigen-binding activity of the single-domain antibody between states of association and non-association with the inhibiting domain. As shown in FIGS. 9A(2′) and 9A(3′), the antigen-binding activity of the displayed fusion polypeptides is first confirmed, and fusion polypeptides that bind to the antigen or has antigen-binding activity of a predetermined value or higher are selected. Then, the fusion polypeptides thus selected are allowed to be associated with the association partner. Fusion polypeptides that do not bind to the antigen or have antigen-binding activity of a predetermined value or lower in this state of association are selected. By this method as well, the fusion polypeptides comprising the single-domain antibody of interest can be obtained.

[0870] Hereinafter, some embodiments using an IgG antibody CH1 domain as the first association sustaining domain and using IgG antibody CL as the second association sustaining domain will be described.

[0871] A fusion polypeptide comprising the single-domain antibody of interest can be screened for from a library comprising a plurality of fusion polypeptides of single-domain antibodies each linked to an IgG antibody CH1 domain.

[0872] In some embodiments, the present invention provides a library comprising a plurality of fusion polypeptides of single-domain antibodies each linked to an IgG antibody CH1 domain, wherein the single-domain antibodies include a single-domain antibody whose antigen-binding activity is inhibited or lost by its association with particular VL, VH or VHH, and a method for screening the library for a fusion polypeptide comprising a single-domain antibody whose antigen-binding activity can be inhibited or could lost by its association with particular VL, VH or VHH.

[0873] In a particular embodiment, the present invention provides a method for screening for a fusion polypeptide comprising a single-domain antibody whose antigen-binding activity can be inhibited or could lost by its association with particular VL, from a library comprising a plurality of fusion polypeptides of single-domain antibodies each linked to an IgG antibody CH1 domain. Specifically, the present invention provides a method for screening for a single-domain antibody, comprising the following steps:
[0874] (a) allowing the fusion polypeptides of the library according to the present invention to be displayed in vitro;
[0875] (b) providing an association partner of an IgG antibody light chain constant region fused with the particular VL;
[0876] (c) allowing each of the fusion polypeptides displayed in the step (a) to be associated with the association partner provided in the step (b) and selecting a fusion polypeptide(s) that does not bind to the antigen or has antigen-binding activity of a predetermined value or lower in a state where the single-domain antibody is associated with the VL; and
[0877] (d) selecting, from the fusion polypeptide(s) thus selected in the step (c), a fusion polypeptide that binds to the antigen or has antigen-binding activity of a predetermined value or higher in a state where the single-domain antibody contained therein is not associated with the VL.

[0878] The association partner provided in the step (b) further comprises a protease cleavage sequence. In this case, in the step (d), the association of the single-domain antibody with the VL is canceled by protease treatment, and the antigen-binding activity of the single-domain antibody may be confirmed in a state where the single-domain antibody is not associated with the VL. The protease cleavage sequence in the association partner is not limited by its position as long as the association of the single-domain antibody with the VL is canceled by cleavage. As an example of the position, the protease cleavage sequence may be located, for example, near the boundary between the VL and the IgG antibody light chain constant region in the association partner, preferably at any position between the amino acid of position 96 (Kabat numbering) of the VL and the amino acid of position 130 (EU numbering) (Kabat numbering position 130) of the antibody light chain constant region, more preferably at any position between the amino acid of position 104 (Kabat numbering) of the VL and the amino acid of position 113 (EU numbering) (Kabat numbering position 113) of the antibody light chain constant region.

[0879] Instead of using the association partner comprising a protease cleavage sequence, the protease cleavage sequence may be introduced into the fusion polypeptides in the library, and the fusion polypeptides can be cleaved by protease so that the association of the single-domain antibody with the VL is canceled. The protease cleavage sequence in each fusion polypeptide is not limited by its position as long as the association of the single-domain antibody with the VL is canceled by cleavage and the single-domain antibody retains its antigen-binding activity even after the cleavage. As an example of the position, the protease cleavage sequence may be located, for example, near the boundary between the single-domain antibody and the IgG antibody CH1 domain in the fusion polypeptide.

[0880] In the step (d), the full length of the fusion polypeptide(s) selected in the step (c) or their moieties comprising the single-domain antibodies may be displayed again, and the antigen-binding activity of the single-domain antibody can be confirmed in a state where the single-domain antibody is not associated with the VL.

[0881] In a particular embodiment, the present invention provides a method for screening for a fusion polypeptide comprising a single-domain antibody whose antigen-binding activity can be inhibited or could lost by its association with particular VH, from a library comprising a plurality of fusion polypeptides of single-domain antibodies each linked to an IgG antibody light chain constant region. Specifically, the present invention provides a method for screening for a fusion polypeptide comprising a single-domain antibody, comprising the following steps:
[0882] (a) allowing the fusion polypeptides of the library according to the present invention to be displayed in vitro;
[0883] (b) providing an association partner of an IgG antibody CH1 domain fused with the particular VH;
[0884] (c) allowing the fusion polypeptides displayed in the step (a) to be associated with the association partner provided in the step (b) and selecting a fusion polypeptide(s) that does not bind to the antigen or has antigen-binding activity of a predetermined value or lower in a state where the single-domain antibody is associated with the VH; and
[0885] (d) selecting, from the fusion polypeptide(s) thus selected in the step (c), a fusion polypeptide that binds to the antigen or has antigen-binding activity of a predetermined value or higher in a state where the single-domain antibody contained therein is not associated with the VH.

[0886] The association partner provided in the step (b) further comprises a protease cleavage sequence. In this case, in the step (d), the association of the single-domain antibody with the VH is canceled by protease treatment, and the antigen-binding activity of the single-domain antibody may be confirmed in a state where the single-domain antibody is not associated with the VH. The protease cleavage sequence in the association partner is not limited by its position as long as the association of the single-domain antibody with the VH is canceled by cleavage. As an example of the position, the protease cleavage sequence may be located, for example, near the boundary between the VH and the IgG antibody CH1 domain in the association partner, preferably at any position between the amino acid of position 101 (Kabat numbering) of the VH and the amino acid of position 140 (EU numbering) of the antibody heavy chain constant region, more preferably at any position between the amino acid of position 109 (Kabat numbering) of the VH and the amino acid of position 122 (EU numbering) of the antibody heavy chain constant region.

[0887] Instead of using the association partner comprising a protease cleavage sequence, the protease cleavage sequence may be introduced into the fusion polypeptides in the library, and the fusion polypeptides can be cleaved by protease so that the association of the single-domain antibody with the VH is canceled. The protease cleavage sequence in each fusion polypeptide is not limited by its position as long as the association of the single-domain antibody with the VH is canceled by cleavage and the single-domain antibody retains its antigen-binding activity even after the cleavage. As an example of the position, the protease cleavage sequence may be located, for example, near the boundary between the single-domain antibody and the IgG antibody light chain constant region in the fusion polypeptide.

[0888] In the step (d), the full length of the fusion polypeptide(s) selected in the step (c) or their moieties comprising the single-domain antibodies may be displayed again, and the antigen-binding activity of the single-domain antibody can be confirmed in a state where the single-domain antibody is not associated with the VH.

[0889] Amino acids contained in each amino acid sequence described in the present invention may be posttranslationally modified (e.g., the modification of N-terminal glutamine to pyroglutamic acid by pyroglutamylation is a modification well known to those skilled in the art). Such an amino acid sequence containing the posttranslationally modified amino acid is also included in the amino acid sequence described in the present invention, as a matter of course.

[0890] It should be understood by those skilled in the art that arbitrary combinations of one or more embodiments described in the present specification are also included in the present invention unless there is technical contradiction on the basis of the technical common sense of those skilled in the art.

### EXAMPLES

[0891] Hereinafter, Examples of the method and the composition of the present invention will be described. It shall be understood that various other embodiments can be carried out in light of the general description mentioned above.

### Example 1 Problem of Existing Protease-Activated Antibodies

[0892] A method for preparing an antibody that exerts antigen-binding activity only through cleavage by protease expressed at a lesion site such as a cancer tissue or an inflammatory tissue has been reported. This antibody, called Probody, is an antibody molecule, as shown in FIG. 1, whose antigen-binding activity is inhibited by connecting an antibody to a peptide masking the antigen-binding site of the antibody via a linker that is cleaved by protease expressed at a lesion site (NPL 18). The masking peptide is dissociated from the Probody by the cleavage of the constituent linker by the protease expressed at the target pathological site so that the resulting antibody molecule restores its antigen-binding activity and becomes capable of binding to the antigen in the target pathological tissue.

[0893] It is believed that the Probody can bind to the antigen selectively at the target pathological site under the mechanism as mentioned above and thereby expand the therapeutic window. However, because the cleavage of the antibody by protease is irreversible in the case of Probody, there may be the possibility that the antibody cleaved at the pathological site is capable of being brought back into blood from the pathological site and binds to the antigen expressed in normal tissue as a result of distributing the antibody to the normal tissues through blood flow. The Probody activated by protease retains a Fc region same as in the Probody before the activation and therefore possesses long blood retention. Therefore, the antibody activated by protease expressed at a pathological site might circulate long in blood. Even protease expressed at an elevated level at a pathological site is also expressed at a low level in normal tissues, and free protease produced at a pathological site may be leaked into blood (The Chinese-German Journal of Clinical Oncology June 2004, Vol. 3, No. 2 P78-P80). Therefore, the Probody may be activated by such free protease. Hence, there may be a possibility that the Probody is activated at a site other than a pathological site. The Probody thus activated also circulates long in blood. Thus, there is a possibility that the Probody is continuously activated at a pathological site, in normal tissues, and in blood, and the activated Probody, if having long blood retention, accumulates in blood. The activated Probody accumulated in blood might exhibit side effects by binding to the antigen expressed in normal tissues (FIG. 2).

[0894] The antigen-binding activity of the Probody is inhibited by a masking peptide linked to an antibody via a linker, but the antigen-binding activity is not completely inhibited. The Probody is in equilibrium between a state where the masking peptide linked via the linker is bound with the antigen-binding site and a state where the masking peptide is dissociated therefrom. A molecule in the dissociated state can bind to the antigen (FIG. 3). In actuality, anti-EGFR Probody described in NPL 17 has binding activity against EGFR even before protease cleavage of the linker. Although the antigen-binding activity increases 30 to 100 fold by the protease cleavage of the linker, the Probody present at a high concentration before activation might exhibit side effects by binding to the antigen expressed in normal tissues, because the Probody before activation has 1/30 to 1/100 of the binding activity of the activated Probody.

[0895] The Probody employs an artificial peptide for masking the antigen-binding site of the antibody. The artificial peptide has a sequence absent in native human proteins and might therefore has immunogenicity in humans. Such immunogenicity is known to decrease the effects of antibody drugs by inducing anti-drug antibodies (Blood. 2016 Mar. 31; 127 (13): 1633-41).

[0896] Possible anti-drug antibodies against Probody are an anti-drug antibody against a complex of the antibody and the masking peptide (Probody before activation), an anti-drug antibody against the antibody dissociated from the masking peptide (activated Probody), an anti-drug antibody against the masking peptide (masking peptide dissociated from the activated Probody), and the like. Among them, the anti-drug antibody against the masking peptide (anti-masking peptide antibody) might bind to the masking peptide of Probody before activation and thereby activate the Probody even without protease cleavage (FIG. 4). The Probody activated by the anti-masking peptide antibody might exhibit side effects by binding to the antigen expressed in normal tissues.

### Example 2 Concept of Protease-Activated Polypeptide Comprising Single-Domain Antibody

[0897] As shown in Example 1, the Probody technology presents the following problems:

1. Probody activated by protease cleavage has long blood retention.
2. Even Probody before protease cleavage has binding activity against the antigen.
3. The masking peptide is an artificial non-human sequence and may induce anti-masking peptide antibodies.

[0898] The present inventors thought that a useful way for solving these problems and providing an antibody drug exerting activity at pathological sites is to satisfy the following conditions:

1. An antigen-binding domain activated by protease cleavage has a short half-life in blood.
2. The antigen-binding activity of a molecule before protease cleavage is minimized.
3. The masking peptide having an artificial non-human sequence is not used.

[0899] The present inventors devised a molecule shown in FIG. 5 as one example of a polypeptide that satisfies the conditions described above. The polypeptide with an antigen-binding domain linked to a carrying moiety has a long half-life and does not bind to the antigen because the antigen-binding activity of the antigen-binding domain is inhibited (A). The antigen-binding domain is released, and the antigen-binding domain thus released restores its antigen-binding activity and also has a short half-life (B).

[0900] The polypeptide shown in FIG. 5 has various variations. In the case of using an IgG antibody-like molecule, the polypeptide may be produced by a production method as illustrated in FIG. 6. First, a single-domain antibody (e.g., VH or VHH) binding to the target antigen is obtained (A). The obtained single-domain antibody is allowed to be associated, as a substitute for one of VH and VL of an IgG antibody having a germline sequence, with the other one (VL or VH) to form an IgG antibody-like molecule (B). A protease cleavage sequence is introduced into the IgG antibody-like molecule (C). Examples of the introduction position include a position near the boundary between the harbored single-domain antibody (VH or VHH) and the constant region (CH1 or CL).

[0901] The single-domain antibody has antigen-binding activity when existing alone, but loses its antigen-binding activity upon formation of a variable region with VL, VH, VHH, or the like. VL or VH is a native human antibody sequence having a germline sequence and therefore has a low risk of immunogenicity and is unlikely to induce an anti-drug antibody recognizing this VL or VH. In the case of forming a variable region of the single-domain antibody with VHH, the humanization of the VHH reduces the risk of immunogenicity and reduces the likelihood of inducing an anti-drug antibody recognizing this humanized VHH. The protease cleavage sequence inserted into the IgG antibody-like molecule is cleaved by protease so that the single-domain antibody is released. The released single-domain antibody has antigen-binding activity. The IgG antibody-like molecule before protease cleavage is structurally similar to general IgG molecules and therefore has long blood retention, whereas the single-domain antibody released by protease cleavage has a molecular weight of approximately 13 kDa without retaining a Fc region and therefore disappears rapidly by renal excretion. In actuality, the half-life of full-length IgG is on the order of 2 to 3 weeks (Blood. 2016 Mar. 31; 127 (13): 1633-41), whereas the half-life of the single-domain antibody is approximately 2 hours (Antibodies 2015, 4 (3), 141-156). Hence, the antigen-binding molecule activated by protease has a short half-life in blood and becomes unlikely to bind to the antigens in normal tissues.

[0902] When the single-domain antibody is VL, the same concept as above may be achieved, for example, by introducing the protease cleavage sequence to near the boundary between VL and CL.

### Example 3 Preparation of Protease-Activated Polypeptide Using VHH Binding to IL-6R

[0903] 3-1 Preparation of Polypeptide with Incorporated VHH Binding to IL-6R

[0904] An expression vector encoding IL6R90-G1m (SEQ ID NO: 2) containing IL6R90 (SEQ ID NO: 1), VHH having binding and neutralizing activities against human IL-6R as described in WO2010/115998, fused with a human IgG constant region (CH1-hinge-CH2-CH3) was prepared by a method known to those skilled in the art.

[0905] Expression vectors encoding VK1-39-k0MT (SEQ ID NO: 3), VK2-28-k0MT (SEQ ID NO: 4), VK3-20-k0MT (SEQ ID NO: 5), VL1-40-lamL (SEQ ID NO: 6), VL1-44-lamL (SEQ ID NO: 7), VL2-14-lamL (SEQ ID NO: 8), VL3-21-lamL (SEQ ID NO: 9), k0 (SEQ ID NO: 10), and lamL (SEQ ID NO: 11) as light chains (variable region-constant region) of various subclasses having a human germline sequence were prepared by a method known to those skilled in the art.

[0906] IgG antibody-like molecules IL6R90-G1m/VK1-39-k0MT (heavy chain: SEQ ID NO: 2, light chain: SEQ ID NO: 3), IL6R90-G1m/VK2-28-k0MT (heavy chain: SEQ ID NO: 2, light chain: SEQ ID NO: 4), IL6R90-G1m/VK3-20-k0MT (heavy chain: SEQ ID NO: 2, light chain: SEQ ID NO: 5), IL6R90-G1m/VL1-40-lamL (heavy chain: SEQ ID NO: 2, light chain: SEQ ID NO: 6), IL6R90-G1m/VL1-44-lamL (heavy chain: SEQ ID NO: 2, light chain: SEQ ID NO: 7), IL6R90-G1m/VL2-14-lamL (heavy chain: SEQ ID NO: 2, light chain: SEQ ID NO: 8), IL6R90-G1m/VL3-21-lamL (heavy chain: SEQ ID NO: 2, light chain: SEQ ID NO: 9), IL6R90-G1m/k0 (heavy chain: SEQ ID NO: 2, light chain: SEQ ID NO: 10), and IL6R90-G1m/lamL (heavy chain: SEQ ID NO: 2, light chain: SEQ ID NO: 11) were expressed by transient expression using FreeStyle 293 cells (Invitrogen Corp.) by a method known to those skilled in the art, and purified by a method known to those skilled in the art using protein A.

[0907] 3-2 IL-6R Binding Evaluation of Polypeptide with Incorporated VHH Binding to Human IL-6R, IL6R90-G1m/VK1-39-k0MT, IL6R90-G1m/VK2-28-k0MT, IL6R90-G1m/VK3-20-k0MT, IL6R90-G1m/VL1-40-lamL, IL6R90-G1m/VL1-44-lamL, IL6R90-G1m/VL2-14-lamL, IL6R90-G1m/VL3-21-lamL, IL6R90-G1m/k0, and IL6R90-G1m/lamL were Evaluated for their Binding Activity Against Human IL-6R by the Following Method.

[0908] Recombinant human IL-6R used as an antigen was prepared as follows: a CHO line stably expressing soluble human IL-6R (hereinafter, also referred to as hsIL-6R, IL6R or IL-6R) consisting of an amino acid sequence from positions 1 to 357 counted from the N terminus as reported in J. Immunol. 152, 4958-4968 (1994) was constructed by a method known to those skilled in the art, cultured, and allowed to express hsIL-6R. From the obtained culture supernatant, hsIL-6R was purified by 2 steps of Blue Sepharose 6 FF column chromatography and gel filtration column chromatography. A fraction eluted as a main peak in the final step was used as a final purified product.

[0909] The hsIL-6R binding evaluation of each molecule was conducted using Octet HTX (Pall ForteBio Corp.). Specifically, each molecule was allowed to bind to Biosensor/Protein A (ProA) (Pall ForteBio Corp., 18-5013), and hsIL-6R was allowed to act thereon, followed by binding evaluation at 30° C. Sensorgrams showing real time binding responses measured using Octet HTX are shown in FIG. 10. IL6R90-G1m/k0 and IL6R90-G1m/lamL lacking VL bound to hsIL-6R, whereas IL6R90-G1m/VK1-39-k0MT, IL6R90-G1m/VK2-28-k0MT, IL6R90-G1m/VK3-20-k0MT, IL6R90-G1m/VL1-40-lamL, IL6R90-G1m/VL1-44-lamL, and IL6R90-G1m/VL2-14-lamL containing a variable region formed with VL were shown to be unable to bind to hsIL-6R. From this, it was found that VHH having binding activity against human IL-6R can lose its IL-6R binding activity by forming a variable region through association with VL.

[0910] 3-3 Introduction of Protease Cleavage Sequence to Polypeptide with Incorporated VHH Binding to IL-6R

[0911] Study was conducted to insert a protease cleavage sequence near the boundary between the anti-human IL-6R VHH IL6R90 and CH1. Six types of heavy chains shown in FIG. 11 were designed such that peptide sequence A (SEQ ID NO: 12), a reported sequence cleavable by cancer-specifically expressed urokinase (uPA) and MT-SP1, was inserted at 3 sites near the boundary between IL6R90 and CH1 with or without a glycine-serine linker. Expression vectors encoding IL6R90H1001 (SEQ ID NO: 13), IL6R90H1002 (SEQ ID NO: 14), IL6R90H1003 (SEQ ID NO: 15), IL6R90H1004 (SEQ ID NO: 16), IL6R90H1005 (SEQ ID NO: 17), and IL6R90H1006 (SEQ ID NO: 18) were prepared by a method known to those skilled in the art.

[0912] IgG antibody-like molecules IL6R90H1001/VK1-39-k0MT (heavy chain: SEQ ID NO: 13, light chain: SEQ ID NO: 3), IL6R90H1002/VK1-39-k0MT (heavy chain: SEQ ID NO: 14, light chain: SEQ ID NO: 3), IL6R90H1003/VK1-39-k0MT (heavy chain: SEQ ID NO: 15, light chain: SEQ ID NO: 3), IL6R90H1004/VK1-39-k0MT (heavy chain: SEQ ID NO: 16, light chain: SEQ ID NO: 3), IL6R90H1005/VK1-39-k0MT (heavy chain: SEQ ID NO: 17, light chain: SEQ ID NO: 3), and IL6R90H1006/VK1-39-k0MT (heavy chain: SEQ ID NO: 18, light chain: SEQ ID NO: 3) were expressed by transient expression using these heavy chains and VK1-39-k0MT (SEQ ID NO: 3) as light chain and using FreeStyle 293 cells (Invitrogen Corp.) by a method known to those skilled in the art, and purified by a method known to those skilled in the art using protein A.

[0913] 3-4 Activation of Polypeptide Harboring Protease Cleavage Sequence by Protease Cleavage

[0914] Whether IL6R90H1001/VK1-39-k0MT, IL6R90H1002/VK1-39-k0MT, IL6R90H1003/VK1-39-k0MT, IL6R90H1004/VK1-39-k0MT, IL6R90H1005/VK1-39-k0MT, and IL6R90H1006/VK1-39-k0MT would release VHH having binding activity against IL-6R by protease cleavage was verified.

[0915] Soluble human IL-6R was prepared by a method known to those skilled in the art. The prepared soluble human IL-6R was biotinylated by a method known to those skilled in the art.

[0916] For the purpose of attaching biotin to the C terminus of soluble human IL-6R (also referred to as hsIL-6R or soluble human IL-6R; SEQ ID NO: 35), a gene fragment encoding a specific sequence (AviTag sequence; SEQ ID NO: 36) to be biotinylated by biotin ligase was linked via a gene fragment encoding a linker to downstream of a gene fragment encoding hsIL-6R. A gene fragment encoding a protein containing hsIL-6R linked to the AviTag sequence (hsIL-6R-Avitag; SEQ ID NO: 37) was inserted into a vector for expression in animal cells. The constructed plasmid vector was transfected into FreeStyle 293 cells (Invitrogen Corp.) using 293Fectin (Invitrogen Corp.). In this operation, the cells were cotransfected with a gene for EBNA1 (SEQ ID NO: 57) expression and a gene for biotin ligase (BirA; SEQ ID NO: 58) expression, and biotin was further added thereto for the purpose of biotin-labeling hsIL-6R-Avitag. The cells transfected according to the procedures mentioned above were cultured at 37° C. under 8% CO₂ to allow secretion of the protein of interest (hsIL-6R-BAP1) into the culture supernatant. This cell culture solution was filtered through a 0.22 m bottle-top filter to obtain a culture supernatant.

[0917] An anti-human IL-6R antibody was immobilized onto HiTrap NHS-activated HP (GE Healthcare Japan Corp.) according to the protocol of the manufacturer to prepare a column (anti-human IL-6R antibody column). The culture supernatant was applied to the anti-human IL-6R antibody column equilibrated with TBS, followed by the elution of the bound hsIL-6R with 2 M arginine (pH 4.0). Next, the eluate from the anti-human IL-6R antibody column was diluted with TBS and then applied to SoftLink Avidin column (Promega Corp.) equilibrated with TBS, followed by the elution of hsIL-6R-BAP1 with 5 mM biotin, 50 mM Tris-HCl (pH 8.0) and 2 M arginine (pH 4.0). From this eluate, aggregates of hsIL-6R-BAP1 were removed by gel filtration chromatography using Superdex 200 (GE Healthcare Japan Corp.) to obtain purified hsIL-6R-BAP1 with the buffer replaced with D-PBS and 0.05% CHAPS.

[0918] Recombinant Human Matriptase/ST14 Catalytic Domain (R&D Systems, Inc., 3946-SE-010) was used as the protease. 12.5 nM protease and 100 μg/mL of each IgG antibody-like molecule were incubated in PBS under a condition of 37° C. for 20 hours. Then, cleavage by the protease was evaluated by reducing SDS-PAGE. The results are shown in FIG. 12. As a result, the protease cleavage of the protease cleavage sequence near the boundary between the VHH and the heavy chain constant region was confirmed in IL6R90H1002/VK1-39-k0MT, IL6R90H1004/VK1-39-k0MT, IL6R90H1005/VK1-39-k0MT, and IL6R90H1006/VK1-39-k0MT.

[0919] Next, the IL-6R binding evaluation of VHH released by protease treatment was conducted using Octet HTX (Pall ForteBio Corp.). Specifically, hsIL-6R-BAP1 was allowed to bind to a streptavidin sensor (Pall ForteBio Corp., 18-5021), and each cleaved IgG antibody-like molecule was allowed to act thereon, followed by binding evaluation at 30° C. Sensorgrams showing real time binding responses measured using Octet HTX are shown in FIG. 13. As a result, the binding was confirmed in IL6R90H1002/VK1-39-k0MT, IL6R90H1004/VK1-39-k0MT, IL6R90H1005/VK1-39-k0MT, and IL6R90H1006/VK1-39-k0MT. IL6R90-G1m/k0 and IL6R90-G1m/lamL divalently binds with avidity, whereas the released VHH binds with affinity. Therefore, the protease-treated IL6R90H1002/VK1-39-k0MT, IL6R90H1004/VK1-39-k0MT, IL6R90H1005/VK1-39-k0MT, and IL6R90H1006/VK1-39-k0MT exhibited a faster dissociation rate from IL-6R than that of IL6R90-G1m/k0 and IL6R90-G1m/lamL. Also, the VHH has a smaller molecular weight than that of IL6R90-G1m/k0 and IL6R90-G1m/lamL. Therefore, its response, binding amount, was lower.

[0920] These results demonstrated that IL6R90H1002/VK1-39-k0MT, IL6R90H1004/VK1-39-k0MT, IL6R90H1005/VK1-39-k0MT, or IL6R90H1006/VK1-39-k0MT does not exhibit binding activity against IL-6R as is, whereas the peptide sequence A inserted near the boundary between the VHH and the heavy chain constant region is cleaved by protease treatment so that the VHH domain is released, and the released VHH can bind to IL-6R. From this, it was concluded that the molecule conforming to the concept described in Example 2 was actually able to be prepared.

### Example 4 Preparation of Protease-Activated Polypeptide by Alteration Using VHH Binding to IL-6R

[0921] 4-1 IL-6R Binding Evaluation of Polypeptide with Incorporated VHH Binding to IL-6R

[0922] An expression vector encoding 20A11-G1m (SEQ ID NO: 38) containing 20A11 (SEQ ID NO: 19), VHH having binding and neutralizing activities against IL-6R as described in WO2010/115998, fused with a human IgG1 constant region (CH1-hinge-CH2-CH3) in the same way as in Example 3 was prepared by a method known to those skilled in the art.

[0923] Polypeptides 20A11-G1m/VK1-39-k0MT, 20A11-G1m/VK2-28-k0MT, 20A11-G1m/VK3-20-k0MT, 20A11-G1m/VL1-40-lamL, 20A11-G1m/VL1-44-lamL, 20A11-G1m/VL2-14-lamL, and 20A11-G1m/VL3-21-lamL were expressed and purified in the same way as in Example 3 using this heavy chain and VK1-39-k0MT (SEQ ID NO: 3), VK2-28-k0MT (SEQ ID NO: 4), VK3-20-k0MT (SEQ ID NO: 5), VL1-40-lamL (SEQ ID NO: 6), VL1-44-lamL (SEQ ID NO: 7), VL2-14-lamL (SEQ ID NO: 8), and VL3-21-lamL (SEQ ID NO: 9) as light chains.

[0924] The obtained 20A11-G1m/VK1-39-k0MT (heavy chain: SEQ ID NO: 38, light chain: SEQ ID NO: 3), 20A11-G1m/VK2-28-k0MT (heavy chain: SEQ ID NO: 38, light chain: SEQ ID NO: 4), 20A11-G1m/VK3-20-k0MT (heavy chain: SEQ ID NO: 38, light chain: SEQ ID NO: 5), 20A11-G1m/VL1-40-lamL (heavy chain: SEQ ID NO: 38, light chain: SEQ ID NO: 6), 20A11-G1m/VL1-44-lamL (heavy chain: SEQ ID NO: 38, light chain: SEQ ID NO: 7), 20A11-G1m/VL2-14-lamL (heavy chain: SEQ ID NO: 38, light chain: SEQ ID NO: 8), and 20A11-G1m/VL3-21-lamL (heavy chain: SEQ ID NO: 38, light chain: SEQ ID NO: 9) were evaluated for their binding to IL-6R in the same way as in Example 3. The results are shown in FIG. 14. As a result, none of the light chains used in this Example inhibited the IL-6R binding activity of 20A11 by the association with the heavy chain containing the 20A11 fused with the human germline IgG constant region (CH1-hinge-CH2-CH3).

[0925] This is probably because 20A11 did not form a stable variable region with VL used in this Example.

[0926] 4-2 Introduction of Amino Acid Alteration to Interface Site Between VHH and VL in Polypeptide with Incorporated VHH not Losing Antigen Binding

[0927] In order to form a stable variable region between 20A11 and VL, mutations were introduced to amino acids present at the interface between the 20A11 and the VL. An expression vector encoding 20A11hu-G1m (SEQ ID NO: 39) containing 20A11hu (derived from 20A11 by the introduction of mutations to substitute F at position 37 with V (F37V), R at position 45 with L, and G at position 47 with W (all according to the Kabat numbering)) (SEQ ID NO: 20) fused with a human IgG constant region (CH1-hinge-CH2-CH3) in the same way as in Example 3 was prepared by a method known to those skilled in the art.

[0928] Polypeptides 20A11hu-G1m/VK1-39-k0MT (heavy chain: SEQ ID NO: 39, light chain: SEQ ID NO: 3), 20A11hu-G1m/VK2-28-k0MT (heavy chain: SEQ ID NO: 39, light chain: SEQ ID NO: 4), 20A11hu-G1m/VK3-20-k0MT (heavy chain: SEQ ID NO: 39, light chain: SEQ ID NO: 5), 20A11hu-G1m/VL1-40-lamL (heavy chain: SEQ ID NO: 39, light chain: SEQ ID NO: 6), 20A11hu-G1m/VL1-44-lamL (heavy chain: SEQ ID NO: 39, light chain: SEQ ID NO: 7), 20A11hu-G1m/VL2-14-lamL (heavy chain: SEQ ID NO: 39, light chain: SEQ ID NO: 8), and 20A11hu-G1m/VL3-21-lamL (heavy chain: SEQ ID NO: 39, light chain: SEQ ID NO: 9) were expressed and purified in the same way as in Example 3 using this heavy chain and VK1-39-k0MT (SEQ ID NO: 3), VK2-28-k0MT (SEQ ID NO: 4), VK3-20-k0MT (SEQ ID NO: 5), VL1-40-lamL (SEQ ID NO: 6), VL1-44-lamL (SEQ ID NO: 7), VL2-14-lamL (SEQ ID NO: 8), and VL3-21-lamL (SEQ ID NO: 9) as light chains.

[0929] 4-3 IL-6R Binding Evaluation of Polypeptide with Incorporated VHH Containing Amino Acid Alteration at Interface Site Between the VHH and VL

[0930] The obtained 20A11hu-G1m/VK1-39-k0MT, 20A11hu-G1m/VK2-28-k0MT, 20A11hu-G1m/VK3-20-k0MT, 20A11hu-G1m/VL1-40-lamL, 20A11hu-Gm/VL1-44-lamL, 20A11hu-G1m/VL2-14-lamL, and 20A11hu-G1m/VL3-21-lamL were evaluated for their binding to IL-6R at 30° C. or 25° C. in the same way as in Example 3. The results are shown in FIG. 15.

[0931] As a result, 20A11hu-Gm/VK1-39-k0MT, 20A11hu-G1m/VK2-28-k0MT, 20A11hu-G1m/VK3-20-k0MT, 20A11hu-G1m/VL1-40-lamL, 20A11hu-G1m/VL1-44-lamL, and 20A11hu-G1m/VL2-14-lamL were shown to be unable to bind to IL-6R.

[0932] These results demonstrated that the VHH 20A11, which did not lose its IL-6R binding activity by the association with VL, used in Example 3, can form a stable variable region with VL and can lose its IL-6R binding activity, by converting amino acids present at the interface site between the VHH and the VL to 37V, 45L, and 47W (Kabat numbering) and thereby altering the 20A11 to 20A11hu.

[0933] 4-4 Introduction of Protease Cleavage Sequence to Polypeptide with Incorporated VHH Containing Amino Acid Alteration at Interface Site Between the VHH and VL

[0934] Heavy chains 20A11huH1001 (SEQ ID NO: 40), 20A11huH1002 (SEQ ID NO: 41), 20A11huH1004 (SEQ ID NO: 42), and 20A11huH1006 (SEQ ID NO: 43) were prepared in the same way as in Example 3 such that a protease cleavage sequence (SEQ ID NO: 12) or a protease cleavage sequence linked to a flexible linker (SEQ ID NO: 44) was inserted near the boundary between 20A11hu and CH1.

[0935] Polypeptides 20A11huH1001VK1-39-k0MT (heavy chain: SEQ ID NO: 40, light chain: SEQ ID NO: 3), 20A11huH1002NK1-39-k0MT (heavy chain: SEQ ID NO: 41, light chain: SEQ ID NO: 3), 20A11huH1004NK1-39-k0MT (heavy chain: SEQ ID NO: 42, light chain: SEQ ID NO: 3), and 20A11huH1006NK1-39-k0MT (heavy chain: SEQ ID NO: 43, light chain: SEQ ID NO: 3) were expressed and purified in the same way as in Example 3 using these heavy chains and VK1-39-k0MT (SEQ ID NO: 3) as a light chain.

[0936] 4-5 Activation of Polypeptide Harboring Protease Cleavage Sequence by Protease Cleavage

[0937] 20A11huH1001VK1-39-k0MT, 20A11huH1002NK1-39-k0MT, 20A11huH1004NK1-39-k0MT, and 20A11huH1006NK1-39-k0MT were cleaved by protease in the same way as in Example 3, and the degree of the cleavage was evaluated by reducing SDS-PAGE. The results are shown in FIG. 16.

[0938] As a result, 20A11huH1002NK1-39-k0MT, 20A11huH1004NK1-39-k0MT, and 20A11huH1006NK1-39-k0MT were confirmed to undergo protease cleavage near the boundary between VHH and CH1.

[0939] Next, the IL-6R binding evaluation of VHH released by protease treatment was conducted at 30° C. or 25° C. in the same way as in Example 3. Octet sensorgrams are shown in FIG. 17.

[0940] As a result, the IL-6R binding was confirmed in 20A11huH1002NK1-39-kMT, 20A11huH1004NK1-39-k0MT, and 20A11huH1006NK1-39-k0MT confirmed to undergo cleavage near the boundary between VHH and CH1 by protease treatment.

[0941] These results demonstrated that even if VHH incorporated into a polypeptide does not lose its antigen-binding activity immediately after association with particular VL, the antigen-binding activity can be lost by introducing an association promoting mutation into an amino acid present at the interface between the VHH and the VL.

[0942] From these results, it was concluded that the molecule conforming to the concept described in Example 2 can also be prepared by a method of combining a light chain with VHH containing a substituted amino acid involved in association with the light chain, in addition to the method of combining a light chain with VHH obtained in advance as in Example 3.

### Example 5 Preparation of Protease-Activated Polypeptide Using VHH Derived from Immunized Alpaca

[0943] 5-1 Obtainment of VHH Derived from Immunized Alpaca

[0944] Alpacas were immunized with IL-6R, CD3 or Plexin A1 by a method known to those skilled in the art. 4 and 8 weeks later, PBMCs were collected. From the collected PBMCs, VHH gene was amplified with reference to a method described in J. Immunol. Methods (2007) 324, 13. The amplified VHH gene fragment was connected with gene 3 gene and inserted into a phagemid vector. The phagemid vector having the insert of the VHH fragment was transfected into E. coli by the electroporation method, and phages presenting VHH were obtained by a method already known to those skilled in the art. The obtained phages were evaluated for their binding to IL-6R, CD3 or Plexin A1 by ELISA. The sequence of a bound clone was analyzed by a method known to those skilled in the art to identify VHH binding to the antigen.

[0945] 5-2 Enrichment of VHH Binding to CD3

[0946] VHH binding to human CD3 was identified from the VHH library constructed in Example 5-1. VHH clones having binding capacity against human CD3 were enriched using a biotin-labeled protein containing human CD3$ and human CD36 linked to a human antibody constant region (human CD3ed-Fc) as an antigen. The human CD3ed-Fc was prepared as follows: an expression vector for animal cells having a gene encoding the amino acid sequence represented by SEQ ID NO: 59, a gene encoding the amino acid sequence represented by SEQ ID NO: 60 and a gene encoding BirA (SEQ ID NO: 58) was transfected into FreeStyle 293 cells (Invitrogen Corp.). After the transfection, L-biotin was added thereto, and biotinylation was carried out in a culture solution. Cell culture was performed by shake culture at 37° C. according to the protocol. 4 to 5 days later, the supernatant was collected. From the supernatant, a protein fused with the antibody constant region was obtained using a protein A column (Eshmuno A (Merck KGaA)). For the purpose of further obtaining only a CD388 heterodimer, a fraction of the CD388 heterodimer fused with the antibody constant region (referred to as human CD3ed-Fc) was separated using Anti-FLAG M2 column. Subsequently, gel filtration chromatography (Superdex 200, GE Healthcare Japan Corp.) was carried out to obtain the fraction of the CD388 heterodimer of interest (referred to as human CD3ed-Fc).

[0947] Phage production was performed from E. coli retaining the constructed phagemids for phage display. A phage population was precipitated by the addition of 2.5 M NaC/10% PEG to the culture solution of the E. coli after the phage production, and then diluted with TBS to obtain a phage library solution. Next, BSA was added to the phage library solution so as to attain a final BSA concentration of 4%. Panning was performed with reference to a general panning method using an antigen immobilized onto magnetic beads (J. Immunol. Methods. (2008) 332 (1-2), 2-9; J. Immunol. Methods. (2001) 247 (1-2), 191-203; Biotechnol. Prog. (2002) 18 (2) 212-20; and Mol. Cell Proteomics (2003) 2 (2), 61-9). The magnetic beads used were NeutrAvidin coated beads (FG beads NeutrAvidin) or Streptavidin coated beads (Dynabeads MyOne Streptavidin T1).

[0948] Specifically, 100 pmol of the biotin-labeled antigen was added to the prepared phage library solution, and the phage library solution was contacted with the antigen at room temperature for 60 minutes. The magnetic beads blocked with BSA were added thereto, and the complexes of the antigen and the phages were allowed to bind to the magnetic beads at room temperature for 15 minutes. The beads were washed twice with 0.5 mL of TBST (TBS containing 0.1% Tween 20; TBS was manufactured by Takara Bio Inc.) and then further washed once with 0.5 mL of TBS. Then, 0.5 mL of 1 mg/mL trypsin was added thereto, and the beads were suspended at room temperature for 15 minutes and immediately thereafter, separated using a magnetic stand to recover a phage solution. The recovered phage solution was added to 20 mL of an E. coli strain ER2738 in an exponential stage of growth (OD600: 0.4-0.5). The E. coli was cultured with mild stirring at 37° C. for 1 hour and thereby infected by the phages. The infected E. coli was inoculated to a 225 mm×225 mm plate. Next, the phages were recovered from the culture solution of the inoculated E. coli to prepare a phage library solution. This cycle, called panning, was repeated twice in total. In the second cycle of panning, the beads were washed three times with TBST and subsequently twice with TBS. Also, 4 nmol of human Fc was added in the case of the panning against the human CD3ed-Fc.

[0949] 5-3 Preparation of Protease-Activated IgG Antibody-Like Molecule with Incorporated VHH Binding to CD3

[0950] A nucleotide sequence encoding the VHH sequence (Table 2) of each binding clone for human CD3 obtained in Example 5-1 or 5-2 was connected to a nucleotide sequence encoding a protease cleavage site and a constant region by the method described in Example 3 and inserted into an expression vector for animal cells. The resultant was used as the heavy chain of an IgG antibody-like molecule.

TABLE 2
VHH Binding to Human CD3

| VHH | SEQ ID NO |
|---|---|
| bC3edL1R1N160H01 | 61 |
| bC3edL1R1N161H01 | 62 |
| bC3edL1R1N164H01 | 63 |

[0951] Protease-activated IgG antibody-like molecules shown in Table 3 below were expressed by transient expression using FreeStyle 293 cells (Invitrogen Corp.) by a method known to those skilled in the art, and purified by a method known to those skilled in the art using protein A.

TABLE 3
Protease-activated IgG Antibody-like Molecules
with an Incorporated VHH that Binds to CD3

| | SEQ ID NO | SEQ ID NO |
|---|---|---|
| IgG antibody-like molecule | of heavy chain | of light chain |
| bC3edL1R1N160H01-G1mISHI01/ | 64 | |
| VK1-39-k0MT | | |
| bC3edL1R1N161H01-G1mISHI01/ | 65 | 3 |
| VK1-39-k0MT | | |
| bC3edL1R1N164H01-G1mISHI01/ | 66 | |
| VK1-39-k0MT | | |

[0952] 5-4 Activation of Protease-Activated IgG Antibody-Like Molecules by Protease Cleavage

[0953] The IgG antibody-like molecules prepared in Example 5-3 were cleaved by protease in the same way as in Example 3, and the degree of the cleavage was evaluated by reducing SDS-PAGE. The results are shown in FIG. 18. The protease concentration was set to 25 nM, and Octet RED (Pall ForteBio Corp.) was used in the assay.

[0954] As a result, the IgG antibody-like molecules were confirmed to undergo protease cleavage at the protease cleavage sequence.

[0955] Next, the CD3 binding evaluation of VHH released by protease treatment was conducted in the same way as in Example 3. Octet sensorgrams are shown in FIG. 19.

[0956] As a result, the IgG antibody-like molecules bC3edL1R1N160H01-G1mISHI01/VK1-39-k0MT, bC3edL1R1N161H01-G1mISHIO1/VK1-39-k0MT, and bC3edL1R1N164H01-G1mISHI01/VK1-39-k0MT did not exhibit antigen binding before the protease treatment, whereas the antigen binding was confirmed after the protease treatment. Plurality of VHH binding to CD3 molecules, obtained in the same way as in the VHH described in Table 2, was also used to prepare an IgG-like molecule containing the same protease cleavage site as in the IgG antibody-like molecules described in Table 3. As a result, the antigen binding was confirmed by protease treatment. These results demonstrated that in addition to the polypeptides shown in Examples 3 and 4, an IgG antibody-like molecule harboring a protease cleavage sequence can undergo cleavage at the protease cleavage sequence by protease treatment and thereby release the antigen-binding domain, and the released antigen-binding domain can bind to the antigen.

### Example 6 Polypeptide Harboring Protease Cleavage Sequence in its Light Chain

[0957] Light chains VK1-39P-2-Pk0MT (SEQ ID NO: 67), VK-39P-1-Pk0MT (SEQ ID NO: 68), VK1-39P-Pk0MT (SEQ ID NO: 69), VK1-39P+2-Pk0MT (SEQ ID NO: 70), VK1-39P+3-Pk0MT (SEQ ID NO: 71), VK1-39P+4-Pk0MT (SEQ ID NO: 72), and VK-39P+5-Pk0MT (SEQ ID NO: 73) harboring a protease cleavage sequence at each position were prepared in the same way as in Example 3.

[0958] IgG antibody-like molecules were expressed and purified in the same way as in Example 3 using these light chains and IL6R90-G1m (SEQ ID NO: 2) as a heavy chain. The protease concentration was set to 25 nM. IL6R90-G1m/VK1-39-k0MT (heavy chain: SEQ ID NO: 2, light chain: SEQ ID NO: 3) was used as an IgG antibody-like molecule harboring no cleavage sequence.

[0959] Subsequently, the prepared IgG antibody-like molecules were cleaved by protease in the same way as in Example 3, and the degree of the cleavage was evaluated by reducing SDS-PAGE. The results are shown in FIG. 20. As a result, VK1-39P+2-Pk0MT (SEQ ID NO: 70), VK1-39P+3-Pk0MT (SEQ ID NO: 71), VK1-39P+4-Pk0MT (SEQ ID NO: 72), and VK1-39P+5-Pk0MT (SEQ ID NO: 73) were confirmed to undergo protease cleavage at the protease cleavage sequence. The IL-6R binding evaluation of VHH exposed by protease treatment was further conducted in the same way as in Example 3. Octet sensorgrams are shown in FIG. 21. As a result, the binding was also confirmed by the protease treatment of the cleavage sequence introduced into the light chain, demonstrating that a protease-activated polypeptide harboring a protease cleavage sequence in its light chain can be obtained such that the antigen-binding domain is exposed to exhibit antigen-binding ability by the protease cleavage of the light chain.

### Example 7 Library Containing Heavy Chain Having Antigen-Binding Domain and Light Chain Harboring Protease Cleavage Sequence, and Obtainment of Protease-Activated Polypeptide by Phage Display Method from the Library

[0960] As confirmed in Example 6, even when a protease cleavage sequence is introduced into the light chain of a protease-activated polypeptide, the antigen-binding domain is exposed after cleavage of the light chain to bind to the antigen.

[0961] Accordingly, a heavy chain containing an antigen-binding domain such as a single-domain antibody and a light chain harboring a protease cleavage sequence are incorporated into a phagemid and allowed to be presented by a phage. A plurality of phagemids for phage display containing different types of antigen-binding domains are constructed, followed by phage production from E. coli retaining these phagemids. A phage population is precipitated by the addition of 2.5 M NaCl/10% PEG to the culture solution of the E. coli after the phage production, and then diluted with TBS to obtain a phage library solution. BSA is added to the phage library solution so as to attain a final BSA concentration of 4%.

[0962] The protease-activated polypeptide is obtained by panning from the phage library thus prepared. The panning is performed with reference to a general panning method using an antigen immobilized on magnetic beads (J. Immunol. Methods. (2008) 332 (1-2), 2-9; J. Immunol. Methods. (2001) 247 (1-2), 191-203; Biotechnol. Prog. (2002) 18 (2) 212-20; and Mol. Cell Proteomics (2003) 2 (2), 61-9). Phages unbound with the antigen-immobilized magnetic beads are recovered before addition of protease, and phages bound with the antigen-immobilized magnetic beads are recovered after addition of protease. The magnetic beads used are NeutrAvidin coated beads (Sera-Mag SpeedBeads NeutrAvidin-coated, FG beads NeutrAvidin) or Streptavidin coated beads (Dynabeads M-280 Streptavidin). An antigen-binding clone may be selected from the recovered phages by phage ELISA described in the preceding section, or the antibody gene is subcloned into a vector for expression in animals and expressed using animal cells, and the binding activity is compared between before and after protease treatment to select binding clones.

### Example 8 Library Containing Heavy Chain Having Antigen-Binding Domain and Light Chain, and Obtainment of Heavy Chain Whose Antigen-Binding Ability is Controlled by Light Chain by Phage Display Method from the Library

[0963] As confirmed in Example 3, the antigen-binding ability of a heavy chain containing an antigen-binding domain is controlled by the association of a light chain. Accordingly, a heavy chain that loses its antigen-binding ability when associated with a light chain and exhibits antigen-binding ability when presented alone or in combination with a light chain constant region is obtained by the phage display method.

[0964] A heavy chain containing an antigen-binding domain such as a single-domain antibody is incorporated in a phagemid and presented by a phage. A plurality of phagemids for phage display containing different types of antigen-binding domains are constructed, followed by phage production from E. coli retaining these phagemids. A phage population is precipitated by the addition of 2.5 M NaCl/10% PEG to the culture solution of the E. coli after the phage production, and then diluted with TBS to obtain a phage library solution. BSA is added to the phage library solution so as to attain a final BSA concentration of 4%.

[0965] The heavy chain that exhibits antigen-binding ability when presented alone or in combination with a light chain constant region and loses its antigen-binding ability when associated with the light chain variable region is obtained by panning from the phage library thus prepared. The panning is performed with reference to the panning method using an antigen immobilized onto magnetic beads described in Example 5. Phages bound with the antigen-immobilized magnetic beads are recovered from the phage library presenting heavy chains or heavy chains with light chain constant regions. The recovered phages are allowed to infect E. coli, and phages presenting heavy and light chains are produced using a helper phage expressing a light chain. Phages presenting a heavy chain containing an antigen-binding domain and a light chain are obtained by the method mentioned above from the culture solution of the E. coli after the phage production. Phages unbound with the antigen-immobilized magnetic beads are recovered from the population of phages presenting heavy and light chains.

[0966] As shown in FIG. 9D, the panning may be carried out by changing the order of the recovery of a phage population presenting a heavy chain, either alone or in combination with a light chain constant region, binding to antigen-immobilized magnetic beads, and the recovery of a phage population presenting heavy and light chains without binding to antigen-immobilized magnetic beads. In addition to the method of expressing a light chain using a helper phage, a region encoding a light chain and a region encoding a heavy chain may be incorporated to the same phagemid as usual, and a gene encoding only a light chain constant region or a full-length light chain may be incorporated into each cycle of panning and used.

[0967] An antigen-binding clone may be selected from the recovered phages by phage ELISA described in the preceding section, or the antibody gene is subcloned into a vector for expression in animals and expressed using animal cells, and the binding activity is compared between before and after protease treatment to select binding clones.

### Example 9 Obtainment of VHH Whose Antigen-Binding Ability is Controlled by Light Chain by Use of Phage Display Method, and Preparation of IgG Antibody-Like Molecule Containing the VHH

[0968] In Example 3, it was confirmed that the antigen-binding ability of VHH contained as a substitute for VH in a heavy chain is controlled by association with a light chain.

[0969] Accordingly, VHH that lost its antigen-binding ability when associated with a particular light chain and exhibited antigen-binding ability when the heavy chain was presented alone or in combination with a light chain constant region, i.e., when not associated with a light chain variable region, was obtained from a phage library presenting CH1 linked to VHH derived from immunized alpaca PBMCs. An IgG antibody-like molecule containing the VHH was prepared.

[0970] 9-1 Construction of Light Chain-Expressing Helper Phages with Integrated Light Chain Expression Unit

[0971] On the basis of a method described in WO2015/046554, a promoter, a signal sequence, antibody light chain variable region and light chain constant region genes or a light chain constant region gene, etc. were integrated into the genome of a helper phage to construct a light chain-expressing helper phage. E. coli infected with this helper phage is capable of expressing the antibody light chain variable region and the light chain constant region, or only the light chain constant region.

[0972] Specifically, the genome was extracted from a helper phage M13KO7TC constructed by the method described in WO2015/046554, and a light chain expression unit was introduced into the genome. A gene encoding a light chain variable region and a light chain constant region (VK1-39-k0MTdC; SEQ ID NO: 152), or a gene encoding a light chain constant region (k0MTdC; SEQ ID NO: 153) was used as the light chain gene to be introduced. lac promoter-pelB signal sequence-light chain gene was inserted into M13KO7TC/SacI by the method described above and transfected into an E. coli strain ER2738 by the electroporation method.

[0973] The obtained E. coli was cultured, and 2.5 M NaCl/10% PEG was added to the culture supernatant to purify helper phages by the PEG precipitation method. The titers of the obtained helper phages M13KO7TC-Vk1-39-k0MTdC and M13KO7TC-k0MTdC were confirmed by the general plaque formation method.

[0974] 9-2 Preparation of Library Containing a Plurality of VHH-CH1 Molecules

[0975] Alpacas were immunized by a method known to those skilled in the art using 4 types of immunogens: a human IL-6R extracellular domain, a human CD3εγ heterodimer, a monkey CD3εγ heterodimer and a cell domain of human Plexin A1. 4 weeks later, PBMCs were collected. The CD3εγ heterodimers were prepared with reference to Journal of Molecular Biology (2000) 302: 899-916. From the collected PBMCs, VHH gene was amplified with reference to a method described in J. Immunol. Methods (2007) 324, 13. The amplified VHH gene fragment was connected with CH1-gene 3 gene and inserted into phagemid vectors to prepare a library containing a plurality of VHH-CH1 molecules containing VHH linked to CH1.

[0976] 9-3 Method for Preparing Phage Population Presenting VHH-CH1/Full-Length Light Chain or VHH-CH1/Light Chain Constant Region

[0977] A phagemid vector having an insert of a gene encoding VHH-CH1 is transfected into E. coli by the electroporation method. The obtained E. coli can be cultured and infected by the helper phage M13KO7TC-Vk1-39-k0MTdC prepared in Example 9-1 so that VHH-CH1 expressed from the phagemid vector and the full-length light chain expressed from the helper phage form an Fab structure to prepare a phage population presenting VHH-CH1/full-length light chain (VHH-CH1/Vk1-39-k0MTdC) on the surface of phagemids containing the gene encoding VHH-CH1. Also, the E. coli harboring the phagemid vector having an insert of a gene encoding VHH-CH1 can be cultured and infected by the helper phage M13KO7TC-k0MTdC prepared in Example 9-1 so that VHH-CH1 expressed from the phagemid vector and the light chain constant region expressed from the helper phage form a structure of VHH-CH1 associated with CL to prepare a phage population presenting VHH-CH1/light chain constant region (VHH-CH1/k0MTdC). 2.5 M NaCl/10% PEG can be added to the culture supernatant to purify phages by the PEG precipitation method. The titers of the obtained phages can be confirmed by the general plaque formation method.

[0978] 9-4 Obtainment of VHH-CH1 Containing Plexin A1 VHH Whose Antigen Binding is Inhibited by Association with Light Chain Variable Region and that Exhibits Antigen-Binding Ability in Absence of Light Chain Variable Region, from VHH-CH1 Phage Library

[0979] VHH-CH1 containing VHH whose antigen binding is inhibited by association with a light chain variable region and that exhibited antigen-binding ability in absence of the light chain variable region was obtained by panning from the VHH-CH1 library prepared in Example 9-2.

[0980] The antigen used was biotin-labeled human Plexin A1 prepared in Reference Example.

[0981] The panning method was performed according to the following steps:
[0982] (1) A phage population presenting VHH-CH1/light chain constant region (VHH-CH1/k0MTdC) is produced by the method of Example 9-3 from the VHH-CH1 phage library prepared in Example 9-2, and phages bound with antigen-immobilized magnetic beads are recovered from the population.
[0983] (2) A phage population presenting VHH-CH1/full-length light chain (VHH-CH1/Vk1-39-k0MTdC) is produced by the method of Example 9-3 from the recovered phages, and phages unbound with the antigen-immobilized magnetic beads are recovered from the population.
[0984] (3) The recovered phages are repetitively subjected to the steps (1) and (2) to recover the desired phage.

[0985] As a result of the panning, a plurality of VHH-CH1 molecules were able to be selected whose Plexin A1 binding was inhibited by association with the light chain Vk1-39-k0MTdC and that exhibited binding ability against Plexin A1 in the absence of the light chain variable region.

[0986] Another panning method was performed according to the following steps:
[0987] (1) A phage population presenting VHH-CH1/light chain constant region (VHH-CH1/k0MTdC) is produced by the method of Example 9-3 from the VHH-CH1 phage library prepared in Example 9-2, and phages bound with antigen-immobilized magnetic beads are recovered from the population.
[0988] (2) A phage population presenting VHH-CH1/full-length light chain (VHH-CH1/Vk1-39-k0MTdC) is produced by the method of Example 9-3 from the recovered phages, and phages unbound with the antigen-immobilized magnetic beads are recovered from the population. Phages binding to anti-light chain antibody (EY Laboratories, Inc., Cat. BAT-2107-2)-immobilized magnetic beads are further recovered from the recovered phages.
[0989] (3) The recovered phages are repetitively subjected to the steps (1) and (2) to recover the desired phage.

[0990] As a result of the panning, a plurality of VHH-CH1 molecules were able to be selected whose Plexin A1 binding was inhibited by association with the light chain Vk1-39-k0MTdC and that exhibited binding ability against Plexin A1 in the absence of the light chain variable region.

[0991] The VHH in the VHH-CH1 thus selected by panning can be used in the preparation of IgG antibody-like molecules.

[0992] 9-5 Preparation of Protease-Activated IgG Antibody-Like Molecules with Incorporated VHH Binding to Plexin A1

[0993] A nucleotide sequence encoding the VHH contained in each VHH-CH1 molecule selected in Example 9-4 was connected to a nucleotide sequence encoding a protease cleavage site and a heavy chain constant region by the method described in Example 3. The resultant was used as the heavy chain of an IgG antibody-like molecule and combined with a full-length light chain VK1-39-k0MT (SEQ ID NO: 3). IgG antibody-like molecules were expressed by transient expression using FreeStyle 293 cells (Invitrogen Corp.) by a method known to those skilled in the art, and purified by a method known to those skilled in the art using protein A.

[0994] The prepared IgG antibody-like molecules are shown in Table 4.

TABLE 4
IgG Antibody-like Molecules Containing a VHH that Binds to
Human Plexin A1

| | Heavy chain | | Light chain | |
|---|---|---|---|---|
| | | SEQ | | SEQ |
| | | ID | | ID |
| IgG antibody-like molecule | Name | NO | Name | NO |
| PX02-R2_001-G1mISHI01/ | PX02-R2_001- | 154 | VK1-39- | 3 |
| VK1-39-k0MT | G1mISHI01 | | k0MT | |
| PX02-R4_004-G1mISHI01/ | PX02-R4_004- | 155 | | |
| VK1-39-k0MT | G1mISHI01 | | | |
| PX02-R4_017-G1mISHI01/ | PX02-R4_017- | 156 | | |
| VK1-39-k0MT | G1mISHI01 | | | |
| PX03-R2_006-G1mISHI01/ | PX03-R2_006- | 157 | | |
| VK1-39-k0MT | G1mISHI01 | | | |
| PX03-R4_009-G1mISHI01/ | PX03-R4_009- | 158 | | |
| VK1-39-k0MT | G1mISHI01 | | | |

[0995] 9-6 Activation of Protease-Activated IgG Antibody-Like Molecule by Protease Cleavage

[0996] The IgG antibody-like molecules prepared in Example 9-4 were cleaved by protease in the same way as in Example 3, and the degree of the cleavage was evaluated by reducing SDS-PAGE. The results are shown in FIG. 22. The protease concentration was set to 25 nM.

[0997] As a result, the prepared IgG antibody-like molecules were each confirmed to undergo protease cleavage at the protease cleavage sequence.

[0998] Next, the human Plexin A1 binding evaluation of VHH released by protease treatment was conducted in the same way as in Example 3. Octet sensorgrams are shown in FIG. 23.

[0999] As a result, each of the prepared IgG antibody-like molecules did not exhibit antigen binding before the protease treatment, whereas the antigen binding of the released VHH was confirmed after the protease treatment.

### Example 10 Polypeptides Containing Bispecific VHH-VHH

[1000] 10-1 Bispecific VHH-VHH Binding to Cancer Antigen and CD3, and Preparation of Polypeptide Containing the Bispecific VHH-VHH

[1001] As shown in FIG. 8, a protease-activated antigen-binding domain may form a bispecific antigen-binding molecule with a second antigen-binding domain.

[1002] VHH HN3 (SEQ ID NO: 159) recognizing human glypican 3 and VHH G03 (SEQ ID NO: 160) recognizing CD3 were connected via a linker constituted by glycine and serine to prepare bispecific VHH-VHH HN3G03. An antibody heavy chain constant region shown in SEQ ID NO: 161 was further connected thereto via a protease cleavage sequence, and the resulting heavy chain HN3G03-cF760mnHIF (SEQ ID NO: 162) containing the bispecific VHH-VHH was inserted into a vector for expression in animals.

[1003] VHH HerF07 (SEQ ID NO: 163) recognizing Her2 and VHH G03 (SEQ ID NO: 160) recognizing CD3 were connected via a linker constituted by glycine and serine to prepare bispecific VHH-VHH HerF07G03. An antibody heavy chain constant region shown in SEQ ID NO: 161 was further connected thereto via a protease cleavage sequence, and the resulting heavy chain HerF07G03-cF760mnHIF (SEQ ID NO: 164) containing the bispecific VHH-VHH was inserted into a vector for expression in animals.

[1004] Expi293 cells (Life Technologies Corp.) were cotransfected with each heavy chain containing the bispecific VHH-VHH and vectors for expression in animals respectively having inserts of a light chain VK1.39-k0MT (SEQ ID NO: 3) and a human constant region sequence VHn-Kn010dGK (SEQ ID NO: 166) from the hinge region to the C terminus, to express a polypeptide containing the bispecific VHH-VHH. Then, the polypeptide containing the bispecific VHH-VHH was purified by a method known to those skilled in the art using a MonoSpin ProA 96-well plate type (GL Sciences Inc., Cat No.: 7510-11312). The polypeptide containing the bispecific VHH-VHH HN3G03 is HN3G03-cF760mnHIF/VHn-Kn010dGK/VK1.39-k0MT, and the polypeptide containing the bispecific VHH-VHH HerF07G03 is HerF07G03-cF760mnHIF/VHn-Kn010dGK/VK1.39-k0MT.

[1005] For protease treatment, uPA (Recombinant Human u-Plasminogen Activator, R&D Systems, Inc.) (final concentration: 25 nM) was added to 40 g of each purified polypeptide containing the bispecific VHH-VHH and incubated at 37° C. for 20 hours or longer. Protease-untreated samples were incubated after addition of PBS instead of protease in the same amount as in the protease. Whether the protease-cleaved polypeptide containing the bispecific VHH-VHH underwent the cleavage as intended was confirmed by reducing SDS-PAGE. The results are shown in FIG. 24. As shown in FIG. 24, it was suggested that the bispecific VHH-VHH was separated from the whole molecule by the protease cleavage.

[1006] 10-2 CD3 Activation Evaluation of Polypeptide Containing Bispecific VHH-VHH Against GPC3 and CD3 by Protease Cleavage

[1007] Agonist activity against CD3 was evaluated using Jurkat-NFAT reporter cells (NFAT luc2_jurkat cell). The Jurkat-NFAT reporter cells area cell line of CD3-expressing human acute T-cell leukemia-derived cells fused with an NFAT response element and luciferase (luc2P) and express luciferase by the activation of a signal downstream of CD3. The target cells used for antibodies based on GPC3 were a SK-pca60 cell line established by forcing a human liver cancer-derived cell line SK-HEP-1 to express human GPC3. The target cells and the effector cells were added at 1.25E+04 cells/well and 7.50E+04 cells/well, respectively, to each well of White-bottomed, 96-well assay plate (Costar, 3917). HN3G03-cF760mnHIF/VHn-Kn010dGK/VK1.39-k0MT with or without protease treatment was added at a final concentration of 1 nM, 10 nM, or 100 nM to the wells. After 24-hour incubation at 37° C. in the presence of 5% CO₂, the luciferase enzyme activity was measured as luminescence intensity using Bio-Glo luciferase assay system (Promega Corp., G7940) according to the attached protocol. 2104 EnVision was used in detection. The results are shown in FIG. 25. No elevation in luciferase activity was seen in the sample without protease treatment, whereas elevation in luciferase activity was shown in HN3G03-cF760mnHIF/VHn-Kn010dGK/VK1.39-k0MT treated with protease. Specifically, HN3G03-cF760mnHIF/VHn-Kn010dGK/VK1.39-k0MT treated with protease was able to be confirmed to have agonist activity against CD3, while the bispecific VHH-VHH against GPC3 and CD3 was released from HN3G03-cF760mnHIF/VHn-Kn010dGK/VK1.39-k0MT by the protease cleavage and exerted the CD3 binding activity inhibited without cleavage.

[1008] 10-3 CD3 Activation Evaluation of Polypeptide Containing Bispecific VHH-VHH Against Her2 and CD3 by Protease Cleavage

[1009] Agonist activity against CD3 was evaluated using Jurkat-NFAT reporter cells (NFAT luc2_jurkat cell). The Jurkat-NFAT reporter cells (effector cells) are a cell line of CD3-expressing human acute T-cell leukemia-derived cells fused with an NFAT response element and luciferase (luc2P) and express luciferase by the activation of a signal downstream of CD3. The target cells used were a LS1034 cell line. The target cells and the effector cells were added at 2.50E+04 cells/well and 7.50E+04 cells/well, respectively, to each well of White-bottomed, 96-well assay plate (Costar, 3917). HerF07G03-cF760mnHIF/VHn-Kn010dGK/VK1.39-k0MT with or without protease treatment was added at a final concentration of 0.01 nM, 0.1 nM, and 1 nM to the wells. After 24-hour incubation at 37° C. in the presence of 5% CO₂, the luciferase enzyme activity was measured as luminescence intensity using Bio-Glo luciferase assay system (Promega Corp., G7940) according to the attached protocol. 2104 EnVision was used in detection. The results are shown in FIG. 26. No elevation in luciferase activity was seen in the sample without protease treatment, whereas elevation in luciferase activity was shown in HerF07G03-cF760mnHIF/VHn-Kn010dGK/VK1.39-k0MT treated with protease. Specifically, HerF07G03-cF760mnHIF/VHn-Kn010dGK/VK1.39-k0MT treated with protease was able to be confirmed to have agonist activity against CD3, while the bispecific VHH-VHH against Her2 and CD3 was released from HerF07G03-cF760mnHIF/VHn-Kn010dGK/VK1.39-k0MT by the protease cleavage and exerted the CD3-binding activity inhibited without cleavage.

### Example 11 Introduction of Various Protease Cleavage Sites to Polypeptide with Incorporated VHH

[1010] 11-1 Introduction of Various Protease Cleavage Sequences to Polypeptide with Incorporated VHH Binding to IL-6R

[1011] An expression vector encoding IL6R90-G1T4 (SEQ ID NO: 167) containing IL6R90 (SEQ ID NO: 1), VHH having binding and neutralizing activities against human IL-6R as described in WO2010/115998, fused with a human IgG1 constant region (CH1-hinge-CH2-CH3) was prepared by a method known to those skilled in the art. An IgG antibody-like molecule IL6R90-G1T4/VK1-39-k0MT (heavy chain: SEQ ID NO: 167, light chain: SEQ ID NO: 3) was expressed by transient expression using FreeStyle 293 cells (Invitrogen Corp.) or Expi293 cells (Life Technologies Corp.) by a method known to those skilled in the art, and purified by a method known to those skilled in the art using protein A.

[1012] Various protease cleavage sequences were inserted near the boundary between VHH and CH1 in the heavy chain of IL6R90-G1T4/VK1-39-k0MT. Expression vectors in which a protease cleavage sequence shown in Table 5 was inserted near the boundary between VHH and CH1 were prepared by methods known to those skilled in the art. Sequences of VHH-containing heavy chains harboring protease cleavage sequence are shown in Table 6.

[1013] These heavy chains were combined with a light chain. IgG1 antibody-like molecules shown in Table 7 harboring protease cleavage sequence near the boundary between VHH and CH1 were transiently expressed using FreeStyle 293 cells (Invitrogen Corp.) or Expi293 cells (Life Technologies Corp.) according to a method known to those skilled in the art, and purified according to a method known to those skilled in the art using protein A.

TABLE 5
Protease Cleavage
Sequences

| SEQ | Cleavage |
|---|---|
| ID NO | sequence |
| 168 | TSGSGRSANARG |
| 169 | TSQSGRSANQRG |
| 170 | TSPSGRSAYPRG |
| 171 | TSGSGRSATPRG |
| 172 | TSQSGRSATPRG |
| 173 | TSASGRSATPRG |
| 174 | TSYSGRSAVPRG |
| 175 | TSYSGRSANFRG |
| 176 | TSSSGRSATPRG |
| 177 | TSTTGRSASPRG |
| 178 | TSTSGRSANPRG |

TABLE 6
VHH-containing Heavy Chains Harboring a Protease
Cleavage Sequence

| SEQ | |
|---|---|
| ID | |
| NO | Name of VHH-containing heavy chain |
| 179 | IL6R90. 12aa0004-G1T4 |
| 180 | IL6R90. 12aa0010-G1T4 |
| 181 | IL6R90. 12aa0016-G1T4 |
| 182 | IL6R90. 12aa0054-G1T4 |
| 183 | IL6R90. 12aa0063-G1T4 |
| 184 | IL6R90. 12aa0081-G1T4 |
| 185 | IL6R90. 12aa0089-G1T4 |
| 186 | IL6R90. 12aa0095-G1T4 |
| 187 | IL6R90. 12aa0103-G1T4 |
| 188 | IL6R90. 12aa0126-G1T4 |
| 189 | IL6R90. 12aa-G1T4 |

TABLE 7
IgG Antibody-like Molecules

| Name of IgG | SEQ ID | SEQ ID |
|---|---|---|
| antibody- | NO of | NO of |
| like molecule | heavy chain | light chain |
| IL6R90. 12aa0004 | 179 | 3 |
| IL6R90. 12aa0010 | 180 | 3 |
| IL6R90. 12aa0016 | 181 | 3 |
| IL6R90. 12aa0054 | 182 | 3 |
| IL6R90. 12aa0063 | 183 | 3 |
| IL6R90. 12aa0081 | 184 | 3 |
| IL6R90. 12aa0089 | 185 | 3 |
| IL6R90. 12aa0095 | 186 | 3 |
| IL6R90. 12aa0103 | 187 | 3 |
| IL6R90. 12aa0126 | 188 | 3 |
| IL6R90. 12aa | 189 | 3 |

[1014] 11-2 Protease Cleavage Evaluation of a Plurality of IgG Antibody-Like Molecules Containing Anti-Human IL-6R VHH Harboring a Protease Cleavage Sequence in the Heavy Chain Region

[1015] Whether the IgG antibody-like molecules prepared in Example 11-1 would be cleaved by protease was verified. Recombinant Human Matriptase/ST14 Catalytic Domain (MT-SP1) (R&D Systems, Inc., 3946-SE-010) was used as the protease. 10 nM protease and 50 μg/mL antibody were reacted in PBS under a condition of 37° C. for 20 hours. Then, cleavage by the protease was evaluated by reducing SDS-PAGE. The results are shown in FIG. 27. As a result, protease treatment of IgG antibody-like molecules harboring any of the protease cleavage sequences generated anew band around 37 kDa. Thus, the IgG antibody-like molecules were confirmed to undergo protease cleavage at the protease cleavage sequences shown in Table 5 inserted near the boundary between VHH and CH1. Also, using similar method, the protease cleavage sequences shown in Table 5 were also confirmed to be cleaved by human uPA and mouse uPA when they are incorporated into an IgG antibody.

### Example 12 Evaluation of Degree of Activation by Protease Cleavage of IgG Antibody-Like Molecule Harboring Protease Cleavage Sequence in its Light Chain

[1016] An expression vector encoding IL6R75-G1m (SEQ ID NO: 191) containing IL6R75 (SEQ ID NO: 190), VHH having binding and neutralizing activities against human IL-6R as described in WO2010/115998, fused with a human IgG constant region (CH1-hinge-CH2-CH3) was prepared by a method known to those skilled in the art. IL6R75hu-G1m (SEQ ID NO: 192) was prepared by introducing amino acid alterations to the interface site between VHH and VL in the same way as in Example 4-2. IgG antibody-like molecules IL6R90-G1m/VK-39P+4-PkMT (heavy chain: SEQ ID NO: 2, light chain: SEQ ID NO: 72), 20A11hu-G1m/VK-39P+4-PkMT (heavy chain: SEQ ID NO: 39, light chain: SEQ ID NO: 72), and IL6R75hu-G1m/VK-39P+4-PkMT (heavy chain: SEQ ID NO: 192, light chain: SEQ ID NO: 72) were expressed and purified in the same way as in Example 3 using the protease cleavage sequence-incorporated light chain VK1-39P+4-Pk0MT (SEQ ID NO: 72) and IL6R90-G1m (SEQ ID NO: 2), 20A11hu-G1m (SEQ ID NO: 39), and IL6R75hu-G1m (SEQ ID NO: 192) as heavy chains.

[1017] IL6R90-G1m/VK1-39P+4-Pk0MT, 20A11hu-G1m/VK1-39P+4-Pk0MT, and IL6R75hu-G1m/VK-39P+4-PkMT were cleaved by protease in the same way as in Example 3, and the degree of the cleavage was evaluated. The results are shown in FIG. 28. Specifically, recombinant Human Matriptase/ST14 Catalytic Domain (R&D Systems, Inc., 3946-SE-010) was used as the protease. 50 nM protease and 50 μg/mL of each IgG antibody-like molecule were reacted in PBS under a condition of 37° C. for 20 hours. Then, cleavage by the protease was evaluated by reducing SDS-PAGE. As a result, IL6R90-G1m/VK1-39P+4-Pk0MT, 20A11hu-G1m/VK1-39P+4-Pk0MT, and IL6R75hu-Gm/VK1-39P+4-Pk0MT were confirmed to undergo protease cleavage near the boundary between VL and CL.

[1018] Next, the IL6R binding of VHH exposed by protease treatment was evaluated by ELISA. Specifically, the hsIL-6R-BAP1 used in Example 3 was immobilized onto a streptavidin-coated 384-well plate (Greiner Bio-One GmbH, 781990), and each cleaved IgG antibody-like molecule was allowed to bind thereto at room temperature. After reaction for 30 minutes, a HRP-labeled anti-human IgG antibody (Sigma-Aldrich Co. LLC, SAB3701362-2MG) was allowed to act thereon at room temperature for 10 minutes, and TMB Chromogen Solution (Life Technologies Corp., 002023) was reacted therewith. After reaction at room temperature for 30 minutes, the reaction was terminated with sulfuric acid, followed by the measurement of absorbance at 450 nm using Synergy HTX multi-mode reader (BioTek Instruments, Inc.). The absorbance ratio of the antigen-immobilized wells to unimmobilized wells was calculated and used as a S/N ratio. The S/N ratio (mean) of ELISA was plotted on the ordinate against the concentration of each IgG antibody-like molecule on the abscissa. The results are shown in FIG. 29. These results showed that the protease-treated IgG antibody-like molecule 20A11hu-G1m/VK1-39P+4-Pk0MT harboring the cleavage sequence in its light chain had 10 or more times the IL-6R binding activity of the protease-untreated IgG antibody-like molecule, and the protease-treated IgG antibody-like molecule IL6R90-G1m/VK1-39P+4-Pk0MT had 1000 or more times the IL-6R binding activity of the protease-untreated one.

### Example 13 Preparation and Evaluation of IgG Antibody-Like Molecules Harboring Diverse Protease Cleavage Sequences

[1019] 13-1 Preparation of Polypeptides Harboring Diverse Protease Cleavage Sequences

[1020] IgG antibody-like molecules were prepared in the same way as in Example 3 using recognition sequences for proteases other than urokinase or matriptase. Various peptide sequences known to be cleaved by MMP-2, MMP-7, MMP-9, or MMP-13 were each inserted near the boundary between the variable and constant regions of IL6R90-G1m, and a peptide sequence containing a flexible linker consisting of a glycine-serine polymer was inserted into the vicinity of these cleavage sequences. The inserted sequences are shown in Table 8.

TABLE 8
Various Inserted Sequences

| | | SEQ |
|---|---|---|
| Protease | Inserted sequence | ID NO |
| MMP-2 | PLGLAG | 34 |
| MMP-9 | | |
| MMP-2 | GAGIPVSLRSGAG | 70 |
| MMP-2 | GPLGIAGO | 71 |
| MMP-2 | GGPLGMLSQS | 72 |
| MMP-2 | PLGLWA | 73 |
| MMP-7 | VPLSLTMG | 35 |
| MMP-7 | GAGVPLSLTMGAG | 75 |
| MMP-9 | GAGVPLSLYSGAG | 76 |
| MMP-13 | GAGPQGLAGQRGIVAG | 91 |
| MMP-2 | GGGGSPLGLAGGGGGS | 193 |
| MMP-9 | | |
| MMP-2 | GGGGSGPLGIAGQGGGGS | 194 |
| MMP-9 | GGGGSGAGVPLSLYSGAGGGGGS | 195 |

[1021] Heavy chains were designed such that these sequences were inserted near the boundary between the variable and constant regions of IL6R90-G1m. Expression vectors encoding the heavy chain variants 6R90EIVHEMP2.1-6R90EICHEMP2.1G1m (SEQ ID NO: 165), 6R90EIVHEMP2.2-6R90EICHEMP2.2G1m (SEQ ID NO: 202), 6R90EIVHEMP2.3-6R90EICHEMP2.3G1m (SEQ ID NO: 203), 6R90EIVHEMP2.4-6R90EICHEMP2.4G1m (SEQ ID NO: 204), 6R90EIVHEMP7.1-6R90EICHEMP7.1G1m (SEQ ID NO: 205), 6R90EIVHEMP7.2-6R90EICHEMP7.2G1m (SEQ ID NO: 206), 6R90EIVHEMP13-6R90EICHEMP13G1m (SEQ ID NO: 207), 6R90EIVHEG4SMP2MP9G4S-6R90EICHEG4SMP2MP9G4SG1m (SEQ ID NO: 196), 6R90EIVHEG4SMP2.2G4S-6R90EIVHEG4SMP2.2G4SG1m (SEQ ID NO: 197), and 6R90EIVHEG4SMP9G4S-6R90EIVHEG4SMP9G4SG1m (SEQ ID NO: 198) were prepared by a method known to those skilled in the art.

[1022] Table 9 shows the IgG antibody-like molecules combining these heavy chain variants with a light chain and harboring the protease cleavage sequence near the boundary between the variable and constant regions of the heavy chain. These IgG antibody-like molecules were expressed by transient expression using FreeStyle 293 cells (Invitrogen Corp.) or Expi293 cells (Life Technologies Corp.) by a method known to those skilled in the art, and purified by a method known to those skilled in the art using protein A.

TABLE 9
IgG Antibody-like Molecules

| | | SEQ | SEQ |
|---|---|---|---|
| | | ID NO | ID NO |
| | | of | of |
| | | heavy | light |
| Protease | IgG antibody-like molecule | chain | chain |
| MMP-2 | 6R90EIVHEMP2. 1-6R90EICHEMP2. 1G1m/ | 165 | 3 |
| | VK1-39-k0MT | | |
| MMP-2 | 6R90EIVHEMP2. 2-6R90EICHEMP2. 2G1m/ | 202 | 3 |
| | VK1-39-k0MT. | | |
| MMP-2 | 6R90EIVHEMP2. 3-6R90EICHEMP2. 3G1m/ | 203 | 3 |
| | VK1-39-k0MT | | |
| MMP-2 | 6R90EIVHEMP2. 4-6R90EICHEMP2. 4G1m/ | 204 | 3 |
| | VK1-39-k0MT | | |
| MMP-7 | 6R90EIVHEMP7. 1-6R90EICHEMP7. 1G1m/ | 205 | 3 |
| | VK1-39-k0MT | | |
| MMP-7 | 6R90EIVHEMP7. 2-6R90EICHEMP7. 2G1m/ | 206 | 3 |
| | VK1-39-k0MT | | |
| MMP-13 | 6R90EIVHEMP13-6R90EICHEMP13G1m/ | 207 | 3 |
| | VK1-39-k0MT | | |
| MMP-2 | 6R90EIVHEG4SMP2MP9G4S-6R90EICHEG4SMP2MP9G4SG1m/ | 196 | 3 |
| MMP-9 | VK1-39-k0MT | | |
| MMP-2 | 6R90EIVHEG4SMP2. 2G4S-6R90EICHEG4SMP2. 2G4SG1m/ | 197 | 3 |
| | VK1-39-k0MT | | |
| MMP-9 | 6R90EIVHEG4SMP9G4S-6R90EICHEG4SMP9G4SG1m/ | 198 | 3 |
| | VK1-39-k0MT | | |

[1023] 13-2 Protease Cleavage Evaluation of IgG Antibody-Like Molecules Harboring Diverse Protease Cleavage Sequences

[1024] Whether the IgG antibody-like molecules prepared in Example 13-1 would be cleaved by protease was verified. Recombinant human MMP-2 (R&D Systems, Inc., 902-MP-010), recombinant human MMP-7 (R&D Systems, Inc., 907-MP-010), recombinant human MMP-9 (R&D Systems, Inc., 911-MP-010), or recombinant human MMP-13 (R&D Systems, Inc., 511-MM-010) was used as the protease. MMP-2, MMP-7, MMP-9, and MMP-13 were used after being each mixed with 1 MMP-aminophenylmercuric acetate (APMA; Abcam PLC, ab112146) and activated at 37° C. for 1 hour or 24 hours. 50 nM, 100 nM, or 500 nM protease and 50 μg/mL or 100 μg/mL of each IgG-antibody like molecule were reacted in PBS or 20 mM Tris-HCl, 150 mM NaCl, and 5 mM CaCl₂) (pH 7.2) (hereinafter, referred to as Tris) under a condition of 37° C. for 20 hours. Then, cleavage by the protease was evaluated by reducing SDS-PAGE. The results are shown in FIGS. 30A and 30B. In FIG. 30B, the protease cleavage was carried out using an assay buffer (MMP Activity Assay Kit (Fluorometric—Green) (ab112146), Component C: Assay Buffer).

[1025] As a result, 6R90EIVHEMP2.1-6R90EICHEMP2.1Gm/VK1-39-k0MT, 6R90EIVHEMP2.2-6R90EICHEMP2.2G1m/VK1-39-k0MT, 6R90EIVHEMP2.3-6R90EICHEMP2.3G1m/VK1-39-k0MT, 6R90EIVHEMP2.4-6R90EICHEMP2.4G1m/VK1-39-k0MT, 6R90EIVHEG4SMP2MP9G4S-6R90EICHEG4SMP2MP9G4SG1m/VK1-39-k0MT, and 6R90EIVHEG4SMP2.2G4S-6R90EICHEG4SMP2.2G4SG1m/VK1-39-k0MT were confirmed to be cleaved by MMP-2. 6R90EIVHEMP7.1-6R90EICHEMP7.1G1m/VK1-39-k0MT and 6R90EIVHEMP7.2-6R90EICHEMP7.2G1m/VK1-39-k0MT were confirmed to be cleaved by MMP-7. 6R90EIVHEG4SMP2MP9G4S-6R90EICHEG4SMP2MP9G4SG1m/VK1-39-k0MT and 6R90EIVHEG4SMP9G4S-6R90EICHEG4SMP9G4SG1m/VK1-39-k0MT were confirmed to be cleaved by MMP-9. 6R90EIVHEMP13-6R90EICHEMP13G1m/VK1-39-k0MT was confirmed to be cleaved by MMP-13.

### Example 14 Evaluation of Various Protease Cleavage Sequences

[1026] 14-1 Preparation of Antibody Variants Harboring Various Protease Cleavage Sequences

[1027] The protease cleavage sequences shown in Table 10 were inserted near the boundary between the light chain variable region and constant region of antibodies having the heavy chain of SEQ ID NO: 831 and the light chain of SEQ ID NO: 832 to prepare light chain variants harboring different protease cleavage sequences (Table 11).

[1028] The light chain variants harboring the protease cleavage sequence prepared as described above were combined with the heavy chain of SEQ ID NO: 831, and the antibody variants shown in Table 12 were transiently expressed using Expi293 cells (Life Technologies) according to a method known to those skilled in the art, and purified according to a method known to those skilled in the art using protein A.

TABLE 10
Protease Cleavage
Sequences

| SEQ | Cleavage |
|---|---|
| ID NO | sequence |
| 178 | TSTSGRSANPRG |
| 488 | TSYTGRSAVPRG |
| 489 | TSYSGRSAVYRG |
| 490 | TSYSGRSAVVRG |
| 491 | TSYSGRSAVHRG |
| 492 | TSYTGRSAVYRG |
| 493 | TSYTGRSAVVRG |
| 494 | TSYTGRSAVHRG |
| 500 | TSYTGRSAVPGG |
| 501 | TSYSGRSAVYGG |
| 502 | TSYSGRSAVVGG |
| 503 | TSYSGRSAVHGG |
| 504 | TSYTGRSAVYGG |
| 505 | TSYTGRSAVVGG |
| 506 | TSYTGRSAVHGG |

TABLE 11
Light Chain Variants

| SEQ ID NO | Name of light chain variant |
|---|---|
| 816 | G7L.106a.12aa-LT0 |
| 817 | G7L.12aa0089.001-LT0 |
| 818 | G7L.12aa0089.002-LT0 |
| 819 | G7L.12aa0089.003-LT0 |
| 820 | G7L.12aa0089.004-LT0 |
| 821 | G7L.12aa0089.005-LT0 |
| 822 | G7L.12aa0089.006-LT0 |
| 823 | G7L.12aa0089.007-LT0 |
| 824 | G7L.12aa0089.001.R11G-LT0 |
| 825 | G7L.12aa0089.002.R11G-LT0 |
| 826 | G7L.12aa0089.003.R11G-LT0 |
| 827 | G7L.12aa0089.004.R11G-LT0 |
| 828 | G7L.12aa0089.005.R11G-LT0 |
| 829 | G7L.12aa0089.006.R11G-LT0 |
| 830 | G7L.12aa0089.007.R11G-LT0 |

TABLE 12
Antibody Variants

| | SEQ ID NO | SEQ ID NO |
|---|---|---|
| Name of antibody variant | of heavy chain | of light chain |
| G7L.106a.12aa | 831 | 816 |
| G7L.12aa0089.001 | 831 | 817 |
| G7L.12aa0089.002 | 831 | 818 |
| G7L.12aa0089.003 | 831 | 819 |
| G7L.12aa0089.004 | 831 | 820 |
| G7L.12aa0089.005 | 831 | 821 |
| G7L.12aa0089.006 | 831 | 822 |
| G7L.12aa0089.007 | 831 | 823 |
| G7L.12aa0089.001.R11G | 831 | 824 |
| G7L.12aa0089.002.R11G | 831 | 825 |
| G7L.12aa0089.003.R11G | 831 | 826 |
| G7L.12aa0089.004.R11G | 831 | 827 |
| G7L.12aa0089.005.R11G | 831 | 828 |
| G7L.12aa0089.006.R11G | 831 | 829 |
| G7L.12aa0089.007.R11G | 831 | 830 |

[1029] 14-2 Evaluation of Protease Cleavage of Antibody Variants Harboring a Protease Cleavage Sequence

[1030] The antibody variants prepared in 14-1 were tested to see whether they would be cleaved by protease treatment. The protease used was recombinant human u-Plasminogen Activator/Urokinase (human uPA, huPA) (R&D Systems; 1310-SE-010). The antibodies were allowed to react for one hour under the conditions of 40 nM protease, 100 μg/mL antibody variant, PBS, and 37° C., and then subjected to reducing SDS-PAGE. The results confirmed that all the antibody variants harboring protease cleavage sequence were cleaved by protease treatment. In other words, it was shown that the protease cleavage sequences in Table 10 can be cleaved by protease. In addition, the antibody variants other than G7L.106a.12aa were all cleaved more efficiently than G7L.106a.12aa.

### Example 15 Evaluation of Various Protease Cleavage Sequences

[1031] 15-1 Preparation of Antibody Variants Harboring Protease Cleavage Sequences

[1032] In addition to the protease cleavage sequences discovered in Example 14, exploration of protease cleavage sequences was further carried out for improved cleavage efficiency and protease selectivity. The protease cleavage sequences shown in Table 13 were inserted near the boundary between the light chain variable region and constant region of antibodies having the heavy chain of SEQ ID NO: 831 and the light chain of SEQ ID NO: 832 to prepare light chain variants harboring different protease cleavage sequences (Tables 14 and 15).

TABLE 13
Protease Cleavage
Sequences

| SEQ | Cleavage |
|---|---|
| ID NO | Sequences |
| 853 | TSTSGRSANPRG |
| 854 | TSTSGRSANPAG |
| 855 | TSTSGRSANPHG |
| 856 | TSTSGRSANPIG |
| 857 | TSTSGRSANPLG |
| 858 | TSTSGRSANPSG |
| 859 | ISTSGRSANPIG |
| 860 | YSTSGRSANPIG |
| 861 | TSYSGRSAVPAG |
| 862 | TSPSGRSANIAG |
| 863 | TSPSQRSANFAG |
| 864 | TSPTGRSANPAG |
| 865 | TSPSGRSAIPAG |
| 866 | TSYTGRSANPAG |
| 867 | TSYSGRSAIPAG |
| 868 | TSISGRSANYAG |
| 869 | TSPSGRSAGPAG |
| 870 | TSYTGRSAVPAG |
| 871 | TSYTGRSAVYAG |
| 872 | TSYTGRSAVVAG |
| 873 | TSYTGRSAVHAG |
| 874 | TSYSGRSAVPHG |
| 875 | TSPSGRSANIHG |
| 876 | TSPSGRSAHFHG |
| 877 | TSPTGRSANPHG |
| 878 | TSPSGRSAIPHG |
| 879 | TSYTGRSANPHG |
| 880 | TSYSGRSAIPHG |
| 881 | TSISGRSANYHG |
| 882 | TSPSGRSAGPHG |
| 883 | TSYTGRSAVPHG |
| 884 | TSYTGRSAVYHG |
| 885 | TSYTGRSAVVHG |
| 886 | TSYTGRSAVHHG |
| 887 | TSYSGRSAVPIG |
| 888 | TSPSGRSANIIG |
| 889 | TSPSGRSANFIG |
| 890 | TSPSGRSANPIG |
| 891 | TSPSGRSAIPIG |
| 892 | TSYTGRSANPIG |
| 935 | ISYTGRSAVPIG |
| 936 | ISYTGRSAVYIG |
| 937 | ISYTGRSAVVIG |
| 938 | ISYTGRSAVHIG |
| 939 | YSYSGRSAVPIG |
| 940 | YSYSGRSANIIG |
| 941 | YSYTGRSANFIG |
| 942 | YSYTGRSANPIG |
| 943 | YSPSGRSAIPIG |
| 944 | YSYTGRSANPIG |
| 945 | YSYSGRSAIPIG |
| 946 | YSISGRSANYIG |
| 947 | YSYSGRSAGPIG |
| 948 | YSYTGRSAVPIG |
| 949 | YSYTGRSAVYIG |
| 950 | YSYTGRSAVVIG |
| 951 | YSYTGRSAVHIG |

TABLE 14
Light Chain Variants

| SEQ ID | |
|---|---|
| NO | Name of light chain variant |
| 952 | G7L.106a.12aa-LT0 |
| 953 | G7L.12aa0177.LT0 |
| 954 | G7L.12aa.0180-LT0 |
| 955 | G7L.12aa.0181-LT0 |
| 956 | G7L.12aa.0182-LT0 |
| 957 | G7L.12aa.0185-LT0 |
| 958 | G7L.12aa.0163-LT0 |
| 959 | G7L.12aa.0168-LT0 |
| 960 | G7L.12aa.0089.0177-LT0 |
| 961 | G7L.12aa.0019.0177-LT0 |
| 962 | G7L.12aa.0020.0177-LT0 |
| 963 | G7L.12aa.0069.0177-LT0 |
| 964 | G7L.12aa.0071.0177-LT0 |
| 965 | G7L.12aa.0087.0177-LT0 |
| 966 | G7L.12aa.0090.0177-LT0 |
| 967 | G7L.12aa.0120.0177-LT0 |
| 968 | G7L.12aa.0157.0177-LT0 |
| 969 | G7L.12aa.0089.001.0177-LT0 |
| 970 | G7L.12aa.0089.005.0177-LT0 |
| 971 | G7L.12aa.0089.005.0177-LT0 |
| 972 | G7L.12aa.0089.007.0177-LT0 |
| 973 | G7L.12aa.0089.0180-LT0 |
| 974 | G7L.12aa.0019.0180-LT0 |
| 975 | G7L.12aa.0020.0180-LT0 |
| 976 | G7L.12aa.0069.0180-LT0 |
| 977 | G7L.12aa.0071.0180-LT0 |
| 978 | G7L.12aa.0087.0180-LT0 |
| 979 | G7L.12aa.0090.0180-LT0 |
| 980 | G7L.12aa.0120.0180-LT0 |
| 981 | G7L.12aa.0157.0180-LT0 |
| 982 | G7L.12aa.0089.001.0180-LT0 |
| 983 | G7L.12aa.0089.005.0180-LT0 |
| 984 | G7L.12aa.0089.006.0180-LT0 |
| 985 | G7L.12aa.0089.007.0180-LT0 |
| 986 | G7L.12aa.0089.0181-LT0 |
| 987 | G7L.12aa.0019.0181-LT0 |
| 988 | G7L.12aa.0020.0181-LT0 |
| 989 | G7L.12aa.0069.0181-LT0 |
| 990 | G7L.12aa.0071.0181-LT0 |
| 991 | G7L.12aa.0087.0181-LT0 |
| 992 | G7L.12aa0090.0181-LT0 |
| 993 | G7L.12aa0120.0181-LT0 |
| 994 | G7L.12aa0157.0181-LT0 |
| 995 | G7L.12aa0089.001.0181-LT0 |
| 996 | G7L.12aa0089.005.0181-LT0 |
| 997 | G7L.12aa0089.006.0181-LT0 |
| 998 | G7L.12aa0089.007.0181-LT0 |
| 999 | G7L.12aa0089.0182-LT0 |
| 1000 | G7L.12aa0019.0182-LT0 |
| 1001 | G7L.12aa0020.0182-LT0 |
| 1002 | G7L.12aa0089.0182-LT0 |
| 1003 | G7L.12aa0071.0182-LT0 |
| 1004 | G7L.12aa0087.0182-LT0 |
| 1005 | G7L.12aa0090.0182-LT0 |
| 1006 | G7L.12aa0120.0182-LT0 |
| 1007 | G7L.12aa0157.0182-LT0 |
| 1008 | G7L.12aa0089.001.0182-LT0 |
| 1009 | G7L.12aa0089.005.0182-LT0 |
| 1010 | G7L.12aa0089.006.0182-LT0 |
| 1011 | G7L.12aa0089.007.0182-LT0 |
| 1012 | G7L.12aa0089.0185-LT0 |
| 1013 | G7L.12aa0019.0185-LT0 |
| 1014 | G7L.12aa0020.0185-LT0 |
| 1015 | G7L.12aa0089.0185-LT0 |
| 1016 | G7L.12aa0071.0185-LT0 |
| 1017 | G7L.12aa0087.0185-LT0 |
| 1018 | G7L.12aa0090.0185-LT0 |
| 1019 | G7L.12aa0120.0185-LT0 |
| 1020 | G7L.12aa0157.0185-LT0 |
| 1021 | G7L.12aa0089.001.0185-LT0 |
| 1022 | G7L.12aa0089.005.0185-LT0 |
| 1023 | G7L.12aa0089.006.0185-LT0 |
| 1024 | G7L.12aa0089.007.0185-LT0 |
| 1025 | G7L.12aa0089.0200-LT0 |
| 1026 | G7L.12aa0019.0200-LT0 |
| 1027 | G7L.12aa0020.0200-LT0 |
| 1028 | G7L.12aa0069.0200-LT0 |
| 1029 | G7L.12aa0071.0200-LT0 |
| 1030 | G7L.12aa0087.0200-LT0 |
| 1031 | G7L.12aa0090.0200-LT0 |
| 1032 | G7L.12aa0120.0200-LT0 |
| 1033 | G7L.12aa0157.0200-LT0 |
| 1034 | G7L.12aa0089.001.0200-LT0 |
| 1035 | G7L.12aa0089.005.0200-LT0 |
| 1036 | G7L.12aa0089.006.0200-LT0 |
| 1037 | G7L.12aa0089.007.0200-LT0 |
| 1038 | G7L.12aa0089.0203-LT0 |
| 1039 | G7L.12aa0019.0203-LT0 |
| 1040 | G7L.12aa0020.0203-LT0 |
| 1041 | G7L.12aa0069.0203-LT0 |
| 1042 | G7L.12aa0071.0203-LT0 |
| 1043 | G7L.12aa0087.0203-LT0 |
| 1044 | G7L.12aa0090.0203-LT0 |
| 1045 | G7L.12aa0120.0203-LT0 |
| 1046 | G7L.12aa0157.0203-LT0 |
| 1047 | G7L.12aa0069.001.0203-LT0 |
| 1048 | G7L.12aa0089.005.0203-LT0 |
| 1049 | G7L.12aa0089.006.0203-LT0 |
| 1050 | G7L.12aa0089.007.0203-LT0 |

TABLE 15
Antibody Variants

| Name of antibody | SEQ ID NO: of | SEQ ID NO: of |
|---|---|---|
| variant | heavy chain | light chain |
| G7L.106a. 12aa | 831 | 952 |
| G7L.12aa.0177 | 831 | 953 |
| G7L.12aa.0180 | 831 | 954 |
| G7L.12aa.0181 | 831 | 955 |
| G7L.12aa.0182 | 831 | 956 |
| G7L.12aa.0185 | 831 | 957 |
| G7L.12aa.0163 | 831 | 958 |
| G7L.12aa.0166 | 831 | 959 |
| G7L.12aa.0089.0177 | 831 | 960 |
| G7L.12aa.0019.0177 | 831 | 961 |
| G7L.12aa.0020.0177 | 831 | 962 |
| G7L.12aa.0069.0177 | 831 | 963 |
| G7L.12aa.0071.0177 | 831 | 964 |
| G7L.12aa.0087.0177 | 831 | 965 |
| G7L.12aa.0090.0177 | 831 | 966 |
| G7L.12aa.0120.0177 | 831 | 967 |
| G7L.12aa.0157.0177 | 831 | 968 |
| G7L.12aa.0089.001.0177 | 831 | 969 |
| G7L.12aa.0089.005.0177 | 831 | 970 |
| G7L.12aa.0089.006.0177 | 831 | 971 |
| G7L.12aa.0089.007.0177 | 831 | 972 |
| G7L.12aa.0089.0180 | 831 | 973 |
| G7L.12aa.0019.0180 | 831 | 974 |
| G7L.12aa.0020.0180 | 831 | 975 |
| G7L.12aa.0069.0180 | 831 | 976 |
| G7L.12aa.0071.0180 | 831 | 977 |
| G7L.12aa.0087.0180 | 831 | 978 |
| G7L.12aa.0090.0180 | 831 | 979 |
| G7L.12aa.0120.0180 | 831 | 980 |
| G7L.12aa.0157.0180 | 831 | 981 |
| G7L.12aa.0089.001.0180 | 831 | 982 |
| G7L.12aa.0089.005.0180 | 831 | 983 |
| G7L.12aa.0089.006.0180 | 831 | 984 |
| G7L.12aa.0089.007.0180 | 831 | 985 |
| G7L.12aa.0089.0181 | 831 | 986 |
| G7L.12aa.0019.0181 | 831 | 987 |
| G7L.12aa.0020.0181 | 831 | 988 |
| G7L.12aa.0069.0181 | 831 | 989 |
| G7L.12aa.0071.0181 | 831 | 990 |
| G7L.12aa.0087.0181 | 831 | 991 |
| G7L.12aa.0090.0181 | 831 | 992 |
| G7L.12aa.0120.0181 | 831 | 993 |
| G7L.12aa.0157.0181 | 831 | 994 |
| G7L.12aa.0089.001.0181 | 831 | 995 |
| G7L.12aa.0089.005.0181 | 831 | 996 |
| G7L.12aa.0089.006.0181 | 831 | 997 |
| G7L.12aa.0089.007.0181 | 831 | 998 |
| G7L.12aa.0089.0182 | 831 | 999 |
| G7L.12aa.0019.0182 | 831 | 1000 |
| G7L.12aa.0020.0182 | 831 | 1001 |
| G7L.12aa.0069.0182 | 831 | 1002 |
| G7L.12aa.0071.0182 | 821 | 1003 |
| G7L.12aa.0087.0182 | 831 | 1004 |
| G7L.12aa.0090.0182 | 831 | 1005 |
| G7L.12aa.0120.0182 | 831 | 1006 |
| G7L.12aa.0157.0182 | 831 | 1007 |
| G7L.12aa.0089.001.0182 | 831 | 1008 |
| G7L.12aa.0089.005.0182 | 831 | 1009 |
| G7L.12aa.0089.006.0182 | 831 | 1010 |
| G7L.12aa.0089.007.0182 | 831 | 1011 |
| G7L.12aa.0089.0185 | 831 | 1012 |
| G7L.12aa.0019.0185 | 831 | 1013 |
| G7L.12aa.0020.0185 | 831 | 1014 |
| G7L.12aa.0069.0185 | 831 | 1015 |
| G7L.12aa.0071.0185 | 831 | 1016 |
| G7L.12aa.0087.0185 | 831 | 1017 |
| G7L.12aa.0090.0185 | 831 | 1018 |
| G7L.12aa.0120.0185 | 831 | 1019 |
| G7L.12aa.0157.0185 | 831 | 1020 |
| G7L.12aa.0089.001.0185 | 831 | 1021 |
| G7L.12aa.0089.005.0185 | 831 | 1022 |
| G7L.12aa.0089.006.0185 | 831 | 1023 |
| G7L.12aa.0089.007.0185 | 831 | 1024 |
| G7L.12aa.0089.0200 | 831 | 1025 |
| G7L.12aa.0019.0200 | 831 | 1026 |
| G7L.12aa.0020.0200 | 831 | 1027 |
| G7L.12aa.0069.0200 | 831 | 1028 |
| G7L.12aa.0071.0200 | 831 | 1029 |
| G7L.12aa.0087.0200 | 831 | 1030 |
| G7L.12aa.0090.0200 | 831 | 1031 |
| G7L.12aa.0120.0200 | 831 | 1032 |
| G7L.12aa.0157.0200 | 831 | 1033 |
| G7L.12aa.0089.001.0200 | 831 | 1034 |
| G7L.12aa.0089.005.0200 | 831 | 1035 |
| G7L.12aa.0089.006.0200 | 831 | 1036 |
| G7L.12aa.0089.007.0200 | 831 | 1037 |
| G7L.12aa.0089.0203 | 831 | 1038 |
| G7L.12aa.0019.0203 | 831 | 1039 |
| G7L.12aa.0020.0203 | 831 | 1040 |
| G7L.12aa.0069.0203 | 831 | 1041 |
| G7L.12aa.0071.0203 | 831 | 1042 |
| G7L.12aa.0087.0203 | 831 | 1043 |
| G7L.12aa.0090.0203 | 831 | 1044 |
| G7L.12aa.0120.0203 | 831 | 1045 |
| G7L.12aa.0157.0203 | 831 | 1046 |
| G7L.12aa.0089.001.0203 | 831 | 1047 |
| G7L.12aa.0089.005.0203 | 831 | 1048 |
| G7L.12aa.0089.006.0203 | 831 | 1049 |
| G7L.12aa.0089.007.0203 | 831 | 1050 |

[1033] 15-2 Evaluation of Protease Cleavage of Antibody Variants Harboring a Protease Cleavage Sequence

[1034] The antibody variants prepared in 15-1 were tested to see whether they would be cleaved by protease treatment. The protease used was recombinant human u-Plasminogen Activator/Urokinase (human uPA, huPA) (R&D Systems; 1310-SE-010) or recombinant human Matriptase/ST14 Catalytic Domain (human MT-SP1, hMT-SP1) (R&D Systems; 3946-SE-010). The antibody variants were allowed to react for one hour under the conditions of 40 nM huPA or 3 nM hMT-SP1, 100 μg/mL antibody variant, PBS, and 37° C., and then subjected to capillary electrophoresis immunoassay. Wes (Protein Simple) was used for capillary electrophoresis immunoassay, and an anti-human lambda chain HRP-labeled antibody (abeam; ab9007) was used to detect light chains before and after cleavage. As a result, a peak of approximately 36 kDa that had been found prior to protease treatment disappeared, and a new peak appeared at approximately 20 kDa. This suggests that the peak of approximately 36 kDa was the uncleaved light chain of the antibody variant, and the peak of approximately 20 kDa was the cleaved light chain. The area of each peak obtained after protease treatment was output using software provided for Wes (Compass for SW; Protein Simple), and the cleavage ratio (%) of the antibody variant was determined with the following formula. (Peak area of cleaved light chain)×100/(Peak area of cleaved light chain+Peak area of uncleaved light chain). The cleavage ratios (%) of the antibody variants treated with huPA are shown in Table 16, and the cleavage ratios of the antibody variants treated with hMT-SP1 are shown in Table 17. Of the antibody variants shown in Tables 16 and 17 mentioned above, those with a higher cleavage ratio with huPA but a lower cleavage ratio with hMT-SP1, in other words, higher selectivity towards huPA, than GM.106a.12aa (heavy chain: G7H-G1 T4 (SEQ ID NO: 831), light chain: G7L.106a.12aa-LT0 (SEQ ID NO: 952)), are shown in Table 18.

TABLE 16
Cleavage Ratios of Antibody Variants (huPA)

| Name of | Cleavage |
|---|---|
| antibody variant | Ratio (%) |
| G7L.106a.12aa | 86.62 |
| G7L.12aa.0177 | 85.50 |
| G7L.12aa.0180 | 85.68 |
| G7L.12aa.0181 | 84.87 |
| G7L.12aa.0182 | 83.98 |
| G7L.12aa.0185 | 82.91 |
| G7L.12aa.0163 | 88.58 |
| G7L.12aa.0168 | 88.12 |
| G7L.12aa0089.0177 | 79.35 |
| G7L.12aa0019.0177 | 91.10 |
| G7L.12aa0020.0177 | 88.82 |
| G7L.12aa0069.0177 | 88.84 |
| G7L.12aa0071.0177 | 71.65 |
| G7L.12aa0087.0177 | 88.64 |
| G7L.12aa0090.0177 | 82.85 |
| G7L.12aa0120.0177 | 90.00 |
| G7L.12aa0157.0177 | 77.83 |
| G7L.12aa0089.001.0177 | 79.68 |
| G7L.12aa0089.005.0177 | 91.36 |
| G7L.12aa0069.006.0177 | 86.39 |
| G7L.12aa0089.007.0177 | 86.52 |
| G7L.12aa0089.0180 | 82.10 |
| G7L.12aa0019.0180 | 82.83 |
| G7L.12aa0020.0180 | 89.09 |
| G7L.12aa0069.0180 | 85.85 |
| G7L.12aa0071.0180 | 85.87 |
| G7L.12aa0087.0180 | 87.87 |
| G7L.12aa0090.0180 | 87.52 |
| G7L.12aa0120.0180 | 83.14 |
| G7L.12aa0157.0180 | 87.37 |
| G7L.12aa0089.001.0180 | 78.29 |
| G7L.12aa0089.005.0180 | 85.47 |
| G7L.12aa0089.006.0180 | 87.50 |
| G7L.12aa0089.007.0180 | 90.07 |
| G7L.12aa0089.0181 | 82.88 |
| G7L.12aa0019.0181 | 89.53 |
| G7L.12aa0020.0181 | 88.63 |
| G7L.12aa0069.0181 | 84.37 |
| G7L.12aa0071.0181 | 87.39 |
| G7L.12aa0087.0181 | 86.12 |
| G7L.12aa0090.0181 | 78.62 |
| G7L.12aa0120.0181 | 77.98 |
| G7L.12aa0157.0181 | 79.61 |
| G7L.12aa0089.001.0181 | 89.18 |
| G7L.12aa0089.005.0181 | 90.12 |
| G7L.12aa0089.006.0181 | 89.92 |
| G7L.12aa0089.007.0181 | 91.27 |
| G7L.12aa0089.0182 | no data |
| G7L.12aa0019.0182 | 87.05 |
| G7L.12aa0020.0182 | 90.72 |
| G7L.12aa0069.0182 | 89.73 |
| G7L.12aa0071.0182 | 82.75 |
| G7L.12aa0087.0182 | 85.02 |
| G7L.12aa0090.0182 | 81.94 |
| G7L.12aa0120.0182 | 80.22 |
| G7L.12aa0157.0182 | 78.22 |
| G7L.12aa0089.001.0182 | 83.32 |
| G7L.12aa0089.005.0182 | 84.25 |
| G7L.12aa0089.006.0182 | 86.29 |
| G7L.12aa0089.007.0182 | 90.06 |
| G7L.12aa0089.0185 | 78.36 |
| G7L.12aa0019.0185 | no data |
| G7L.12aa0020.0185 | no data |
| G7L.12aa0069.0185 | 75.99 |
| G7L.12aa0071.0185 | 82.77 |
| G7L.12aa0087.0185 | 72.78 |
| G7L.12aa0090.0185 | 82.67 |
| G7L.12aa0120.0185 | no data |
| G7L.12aa0157.0185 | 65.10 |
| G7L.12aa0089.001.0185 | 84.78 |
| G7L.12aa0089.005.0185 | 89.84 |
| G7L.12aa0089.006.0185 | 88.54 |
| G7L.12aa0089.007.0185 | 84.01 |
| G7L.12aa0089.0200 | 85.19 |
| G7L.12aa0019.0200 | 89.15 |
| G7L.12aa0020.0200 | 62.65 |
| G7L.12aa0069.0200 | 63.60 |
| G7L.12aa0071.0200 | 65.05 |
| G7L.12aa0087.0200 | 78.18 |
| G7L.12aa0090.0200 | 76.34 |
| G7L.12aa0120.0200 | 55.63 |
| G7L.12aa0157.0200 | 51.04 |
| G7L.12aa0069.001.0200 | 86.49 |
| G7L.12aa0089.005.0200 | 36.47 |
| G7L.12aa0089.006.0200 | 47.77 |
| G7L.12aa0089.007.0200 | 20.50 |
| G7L.12aa0069.0203 | 25.62 |
| G7L.12aa0019.0203 | 26.52 |
| G7L.12aa0020.0203 | 17.24 |
| G7L.12aa0069.0203 | 28.03 |
| G7L.12aa0071.0203 | 9.75 |
| G7L.12aa0087.0203 | 76.83 |
| G7L.12aa0090.0203 | 71.98 |
| G7L.12aa0120.0203 | 55.44 |
| G7L.12aa0157.0203 | 40.79 |
| G7L.12aa0089.001.0203 | 60.70 |
| G7L.12aa0089.005.0203 | 67.48 |
| G7L.12aa0089.006.0203 | 80.67 |
| G7L.12aa0069.007.0203 | 71.85 |

TABLE 17
Cleavage Ratios of Antibody Variants (hMT-SP1)

| Name of | Cleavage |
|---|---|
| antibody variant | Ratio (%) |
| G7L.106a.12aa | 65.07 |
| G7L.12aa.0177 | 21.86 |
| G7L.12aa.0180 | 28.97 |
| G7L.12aa.0181 | 21.72 |
| G7L.12aa.0182 | 28.23 |
| G7L.12aa.0185 | 28.51 |
| G7L.12aa.0163 | 25.57 |
| G7L.12aa.0166 | 25.26 |
| G7L.12aa0089.0177 | 32.38 |
| G7L.12aa0019.0177 | 28.38 |
| G7L.12aa0020.0177 | 28.29 |
| G7L.12aa0069.0177 | 28.21 |
| G7L.12aa0071.0177 | 34.08 |
| G7L.12aa0087.0177 | 23.11 |
| G7L.12aa0090.0177 | 29.23 |
| G7L.12aa0120.0177 | 46.73 |
| G7L.12aa0157.0177 | 20.36 |
| G7L.12aa0089.001.0177 | 25.70 |
| G7L.12aa0089.005.0177 | 24.04 |
| G7L.12aa0089.006.0177 | 22.70 |
| G7L.12aa0089.007.0177 | 36.20 |
| G7L.12aa0089.0180 | 45.07 |
| G7L.12aa0019.0180 | 32.04 |
| G7L.12aa0020.0180 | 41.31 |
| G7L.12aa0069.0180 | 40.60 |
| G7L.12aa0071.0180 | 45.66 |
| G7L.12aa0087.0180 | 25.55 |
| G7L.12aa0090.0180 | 35.34 |
| G7L.12aa0120.0180 | 53.56 |
| G7L.12aa0157.0180 | 22.47 |
| G7L.12aa0089.001.0180 | 39.90 |
| G7L.12aa0089.005.0180 | 33.85 |
| G7L.12aa0089.006.0180 | 30.45 |
| G7L.12aa0089.007.0180 | 37.62 |
| G7L.12aa0089.0181 | 26.58 |
| G7L.12aa0019.0181 | 22.14 |
| G7L.12aa0020.0181 | 32.03 |
| G7L.12aa0069.0181 | 32.43 |
| G7L.12aa0071.0181 | 32.62 |
| G7L.12aa0087.0181 | 21.48 |
| G7L.12aa0090.0181 | 16.56 |
| G7L.12aa0120.0181 | 39.48 |
| G7L.12aa0157.0181 | 19.49 |
| G7L.12aa0089.001.0181 | 24.62 |
| G7L.12aa0069.005.0181 | 25.49 |
| G7L.12aa0069.006.0181 | 23.08 |
| G7L.12aa0089.007.0181 | 31.00 |
| G7L.12aa0089.0182 | no data |
| G7L.12aa0019.0182 | 22.43 |
| G7L.12aa0020.0182 | 26.16 |
| G7L.12aa0069.0182 | 29.41 |
| G7L.12aa0071.0182 | 25.14 |
| G7L.12aa0087.0182 | 19.97 |
| G7L.12aa0090.0182 | 29.72 |
| G7L.12aa0120.0182 | 36.65 |
| G7L.12aa0157.0182 | 19.55 |
| G7L.12aa0089.001.0182 | 28.63 |
| G7L.12aa0069.005.0182 | 23.62 |
| G7L.12aa0069.006.0182 | 21.62 |
| G7L.12aa0089.007.0182 | 19.79 |
| G7L.12aa0089.0185 | 25.62 |
| G7L.12aa0019.0185 | no data |
| G7L.12aa0020.0185 | no data |
| G7L.12aa0069.0185 | 24.64 |
| G7L.12aa0071.0185 | 27.25 |
| G7L.12aa0067.0185 | 17.84 |
| G7L.12aa0090.0185 | 27.38 |
| G7L.12aa0120.0185 | no data |
| G7L.12aa0157.0185 | 12.66 |
| G7L.12aa0089.001.0185 | 17.98 |
| G7L.12aa0069.005.0185 | 14.92 |
| G7L.12aa0089.006.0185 | 15.74 |
| G7L.12aa0089.007.0185 | 21.96 |
| G7L.12aa0089.0200 | 26.28 |
| G7L.12aa0019.0200 | 9.02 |
| G7L.12aa0020.0200 | 12.71 |
| G7L.12aa0069.0200 | 14.34 |
| G7L.12aa0071.0200 | 15.10 |
| G7L.12aa0087.0200 | 14.19 |
| G7L.12aa0090.0200 | 21.19 |
| G7L.12aa0120.0200 | 23.76 |
| G7L.12aa0157.0200 | 8.25 |
| G7L.12aa0089.001.0200 | 21.45 |
| G7L.12aa0089.005.0200 | 16.97 |
| G7L.12aa0089.006.0200 | 12.93 |
| G7L.12aa0089.007.0200 | 17.33 |
| G7L.12aa0089.0203 | 10.82 |
| G7L.12aa0019.0203 | 0.21 |
| G7L.12aa0020.0203 | 6.37 |
| G7L.12aa0069.0203 | 11.43 |
| G7L.12aa0071.0203 | 0.61 |
| G7L.12aa0087.0203 | 11.18 |
| G7L.12aa0090.0203 | 8.63 |
| G7L.12aa0120.0203 | 22.68 |
| G7L.12aa0157.0203 | 7.00 |
| G7L.12aa0089.001.0203 | 16.46 |
| G7L.12aa0089.005.0203 | 14.89 |
| G7L.12aa0089.006.0203 | 13.98 |
| G7L.12aa0089.007.0203 | 19.83 |

TABLE 18
Antibody Variants

| | SEQ ID NO | SEQ ID NO |
|---|---|---|
| Name of antibody variant | of heavy chain | of light chain |
| G7L.12aa0163 | 831 | 958 |
| G7L.12aa0166 | 831 | 959 |
| G7L.12aa0019.0177 | 831 | 961 |
| G7L.12aa0020.0177 | 831 | 962 |
| G7L.12aa0069.0177 | 831 | 963 |
| G7L.12aa0087.0177 | 831 | 965 |
| G7L.12aa0120.0177 | 831 | 967 |
| G7L.12aa0089.005.0177 | 831 | 970 |
| G7L.12aa0089.006.0177 | 831 | 971 |
| G7L.12aa0020.0180 | 831 | 975 |
| G7L.12aa0087.0180 | 831 | 978 |
| G7L.12aa0090.0180 | 831 | 979 |
| G7L.12aa0157.0180 | 831 | 981 |
| G7L.12aa0089.006.0180 | 831 | 984 |
| G7L.12aa0089.007.0180 | 831 | 985 |
| G7L.12aa0019.0181 | 831 | 987 |
| G7L.12aa0020.0181 | 831 | 988 |
| G7L.12aa0071.0181 | 831 | 990 |
| G7L.12aa0087.0181 | 831 | 991 |
| G7L.12aa0089.001.0181 | 831 | 995 |
| G7L.12aa0089.005.0181 | 831 | 996 |
| G7L.12aa0089.006.0181 | 831 | 997 |
| G7L.12aa0089.007.0181 | 831 | 998 |
| G7L.12aa0019.0182 | 831 | 1000 |
| G7L.12aa0020.0182 | 831 | 1001 |
| G7L.12aa0069.0182 | 831 | 1002 |
| G7L.12aa0089.007.0182 | 831 | 1011 |
| G7L.12aa0089.005.0185 | 831 | 1022 |
| G7L.12aa0089.006.0185 | 831 | 1023 |
| G7L.12aa0019.0200 | 831 | 1026 |

### Example 16 In Vivo Cleavage Evaluation of Antibody Variants Harboring Various Protease Cleavage Sequences

[1035] 16-1 Preparation of Bispecific Antibodies Harboring Protease Cleavage Sequences

[1036] The protease cleavage sequences shown in Table 19 were inserted near the boundary between the light chain variable region and constant region of antibodies (parent antibodies) having the heavy chain of SEQ ID NO: 1051 and the light chain of SEQ ID NO: 832 to prepare light chain variants harboring different protease cleavage sequences (Table 20).

[1037] The light chain variants harboring the protease cleavage sequence prepared as described above and the light chain of SEQ ID NO: 832 were combined with the heavy chain of SEQ ID NO: 1051, and the antibody variants shown in Table 21 were transiently expressed using Expi293 cells (Life Technologies) according to a method known to those skilled in the art, and purified according to a method known to those skilled in the art using protein A.

[1038] In addition, an antibody against keyhole limpet hemocyanin, MabKLHn (heavy chain: IC17HdK-F760mnN17 (SEQ ID NO: 1390), light chain: IC17L-k0 (SEQ ID NO: 1391)), was also transiently expressed using Expi293 cells (Life technologies) according to a method known to those skilled in the art, and purified using Protein A according to a method known to those skilled in the art.

[1039] MabKLHn was mixed with the antibody variants shown in Table 21 or with the parent antibody having the heavy chain of SEQ ID NO: 1051 and the light chain of SEQ ID NO: 832 to prepare the bispecific antibodies shown in Table 22 by the method described in WO 2015046467.

TABLE 19
Protease Cleavage
Sequences

| SEQ | Cleavage |
|---|---|
| ID NO | sequence |
| 1052 | TSYTGRSAVPRG |
| 1053 | TSYSGRSAVVRG |
| 1054 | TSYTGRSAVYRG |
| 1055 | TSYTGRSAVHRG |

TABLE 20
Light Chain Variants

| SEQ ID NO | Name of light chain variant |
|---|---|
| 1056 | G7L.12aa0089.001-LT0 |
| 1057 | G7L.12aa0089.003-LT0 |
| 1058 | G7L.12aa0089.005-LT0 |
| 1059 | G7L.12aa0089.007-LT0 |

TABLE 21
Antibody Variants

| | SEQ ID NO | SEQ ID NO |
|---|---|---|
| Name of antibody variant | of heavy chain | of light chain |
| G7L.12aa0089.001 | 1051 | 1056 |
| G7L.12aa0089.003 | 1051 | 1057 |
| G7L.12aa0089.005 | 1051 | 1058 |
| G7L.12aa0089.007 | 1051 | 1059 |

TABLE 22
Bispecific Antibodies

| | Antibody variant | | Anti-KLH antibody | |
|---|---|---|---|---|
| | SEQ ID | SEQ ID | SEQ ID | SEQ ID |
| | NO of | NO of | NO of | NO of |
| Name of bispecific | heavy | light | heavy | light |
| antibody | chain | chain | chain | chain |
| G7//KLH | 1051 | 832 | 1060 | 1061 |
| G7L.12aa0089.001//KLH | 1051 | 1056 | 1060 | 1061 |
| G7L.12aa0089.003//KLH | 1051 | 1057 | 1060 | 1061 |
| G7L.12aa0089.005//KLH | 1051 | 1058 | 1060 | 1061 |
| G7L.12aa0089.007//KLH | 1051 | 1059 | 1060 | 1061 |

[1040] 16-2 Production of a Cell Line Stably Expressing Protease

[1041] B16F10/chGPC3/muPA was used as a protease stable expression cell line to be transplanted into mice. This cell line was produced by introducing a modified mouse chimeric Glypican 3 (chGPC3) gene and a mouse uPA (muPA: NM_008873) gene into a mouse melanoma cell line, B16F10, and establishing and then cloning a stably expressing cell line. B16F10/chGPC3/muPA cells were cultured in RPMI1640 medium (Nacalai Tesque) containing 10% FBS (SIGMA), 0.5 mg/mL Geneticin (Gibco), and 1.5 μg/mL Puromycin (Gibco).

[1042] 16-3 Production of a Syngeneic Tumor Line-Transplanted Mouse Model

[1043] The animals used for transplant were C57BL/6NCrl mice (six weeks old, female) purchased from Charles River Laboratories. B16F10/chGPC3/muPA cells were transplanted subcutaneously into C57BL/6NCrl mice (1E6 cells per animal). When the average volume of the transplanted tumor reached about 200 mm³ to 300 mm³, the mice were used as model mice to which a variant antibody was administered.

[1044] The volume of the tumor graft was calculated with the following formula:

Tumor volume=long diameter×short diameter×short diameter/2

[1045] 16-4 Preparation of Agents to be Administered

[1046] The antibody variants harboring the protease cleavage sequences shown in Table 22 produced in Example 16-1, were used as agents to be administered to the B16F10/chGPC3/muPA cell-transplanted model mice. The agents to be administered were prepared using PBST-buffer (PBS+0.05% Tween20 buffer) such that the concentration of the variant antibody was 0.1 mg/mL.

[1047] 16-5 Administration Test of Antibody Variants in Order to Evaluate Protease Cleavage

[1048] After 11 days of transplant, the B16F10/chGPC3/muPA cell-transplanted mice were given five antibody variant samples harboring different protease cleavage sequences via the tail vein at a dose of 1 mg/kg (mg administered antibody per kg mouse body weight). The names of antibody variants, doses, administration methods, and other details in the administration test are shown in Table 23.

TABLE 23
Summary of the Mouse Administration Tests

| | Number | | | Adminis- | Day of |
|---|---|---|---|---|---|
| | of | | | tration | adminis- |
| Group | animals | Pharmaceutical agent | Dose | method | tration |
| 1 | 3 | G7//KLH | 1 | Tail vein | 11th day |
| | | | mg/kg | | after |
| | | | | | transplan- |
| | | | | | tation |
| 2 | 3 | G7L.12aa0089.001//KLH | 1 | Tail vein | 11th day |
| | | | mg/kg | | after |
| | | | | | transplan- |
| | | | | | tation |
| 3 | 3 | G7L.12aa0089.003//KLH | 1 | Tail vein | 11th day |
| | | | mg/kg | | after |
| | | | | | transplan- |
| | | | | | tation |
| 4 | 3 | G7L.12aa0089.005//KLH | 1 | Tail vein | 11th day |
| | | | mg/kg | | after |
| | | | | | transplan- |
| | | | | | tation |
| 5 | 3 | G7L.12aa0089.007//KLH | 1 | Tail vein | 11th day |
| | | | mg/kg | | after |
| | | | | | transplan- |
| | | | | | tation |

[1049] 16-6 Orbital Blood Collection from B16F10/chGPC3/muPA Cell-Transplanted Model Mice

[1050] On days 1 and 3 after administration of the antibody variant, blood was collected from the eye socket of the B16F10/chGPC3/muPA cell-transplanted model mice. The blood collection was carried out under isoflurane anesthesia. Collected blood was centrifuged at 1,900×g, 4° C. for ten minutes. After the centrifugation, the supernatant was obtained as plasma components and stored at −30° C.

[1051] 16-7 Evaluation of Cleavage of Administered Antibodies Collected from Mice

[1052] Antibodies were purified from the plasma collected in Example 16-6 using Dynabeads Protein A (Thermo; 10001D) according to a method known to those skilled in the art, and subjected to capillary electrophoresis immunoassay in order to evaluate the efficiency of protease cleavage of the antibody variants. Wes (Protein Simple) was used for capillary electrophoresis immunoassay. To detect the antibody light chain, an anti-human lambda chain HRP-labeled antibody (abcam; ab9007) was used. To detect the antibody heavy chain, an anti-human heavy chain HRP-labeled antibody (Protein Simple; 043-491) was used. As a result, a peak of the uncleaved, full-length light chain was detected at approximately 36 kDa with the anti-human lambda chain antibody, and a peak of the full-length heavy chain was detected at approximately 56 kDa with the anti-human heavy chain antibody. The light chain of MabKLHn is a kappa chain, which is not detected with the anti-human lambda chain antibody. Therefore, the anti-human lambda chain antibody can be used to evaluate the cleavage efficiency of the light chain harboring a protease cleavage sequence. The area of each peak obtained by capillary electrophoresis immunoassay was output using software provided for Wes (Compass for SW; Protein Simple), and the ratio of the remaining light chain was calculated as [Peak area of light chain]/[Peak area of heavy chain] to determine the ratio of the full-length light chain that remained uncleaved in the mouse body. The ratios of the remaining light chain of the antibodies collected one day and three days after being administered to mice are shown in FIG. 31. As a result, the antibody variants harboring the protease cleavage sequence shown in Table 21 were found to have a lower remaining light chain ratio than the parent antibody having the heavy chain of SEQ ID NO: 1051 and the light chain of SEQ ID NO: 832 in the body of the tumor-transplanted mice. That is, it was shown that the light chains harboring a protease cleavage sequence were efficiently cleaved in vivo in the tumor-transplanted mice.

### Reference Example 1 Preparation of Biotinylated Plexin A1

[1053] Biotinylated Plexin A1 (also referred to as biotin-labeled human Plexin A1) was prepared by a method known to those skilled in the art. Specifically, a gene fragment encoding a specific sequence (AviTag sequence; SEQ ID NO: 36) to be biotinylated by biotin ligase and a gene fragment encoding a FLAG tag sequence (SEQ ID NO: 199; DYKDDDDK) were linked via a gene fragment encoding a linker constituted by glycine and serine to downstream of a gene fragment encoding the extracellular region of Plexin A1. A gene fragment encoding a protein containing Plexin A1 linked to the AviTag sequence and the FLAG tag sequence (SEQ ID NO: 200) was integrated to a vector for expression in animal cells. The constructed plasmid vector was transfected into FreeStyle 293 cells (Invitrogen Corp.) using 293Fectin (Invitrogen Corp.). In this operation, the cells were cotransfected with a gene for EBNA1 (SEQ ID NO: 57) expression and a gene for biotin ligase (BirA; SEQ ID NO: 58) expression, and biotin was further added thereto for the purpose of biotin-labeling Plexin A1. The cells transfected according to the procedures mentioned above were cultured at 37° C. under 8% CO₂ and caused to secrete the protein of interest (biotinylated Plexin A1) into the culture supernatant. This cell culture solution was filtered through a 0.22 m bottle-top filter to obtain a culture supernatant.

[1054] A column was packed with Anti FLAG M2 agarose (Sigma-Aldrich Co. LLC, #A2220) to prepare a FLAG column. The FLAG column was equilibrated in advance with D-PBS(−). The culture supernatant was applied thereto to bind the biotinylated Plexin A1 to the column. Subsequently, the biotinylated Plexin A1 was eluted using FLAG peptide dissolved in D-PBS(−). Aggregates were removed from this eluate by gel filtration chromatography using HiLoad 26/600 Superdex 200 pg, 320 mL (GE Healthcare Japan Corp., 28-9893-36) to obtain purified biotinylated Plexin A1.

[1055] The embodiments of the invention mentioned above are described in detail with reference to actual examples and illustrated examples with the aim of helping clear understanding. However, the description and illustration in the present specification should not be interpreted as limiting the scope of the present invention. The disclosure of all patent literatures and scientific literatures cited herein is explicitly incorporated herein by reference in its entirety.

### INDUSTRIAL APPLICABILITY

[1056] The polypeptides of the present invention comprising an antigen-binding domain and a carrying moiety having a longer half-life in blood than that of the antigen-binding domain and having an inhibiting domain that inhibits the binding activity of the antigen-binding domain, and pharmaceutical compositions comprising the polypeptide can transport the antigen-binding domain in blood while inhibited the antigen-binding activity of the antigen-binding domain. Also, use of the polypeptide of the present invention can allow the antigen-binding domain to exert its antigen-binding activity specifically at disease sites. Furthermore, since the antigen-binding domain has a shorter half-life at the time of exerting its antigen-binding activity than at the time of transport, the risk of acting systemically is decreased. Thus, the polypeptides and the pharmaceutical compositions of the present invention are very useful in the treatment of diseases.

[1057] A single-domain antibody whose antigen-binding activity is inhibited by its association with particular VL, VH or VHH can be screened for or produced as one example of the antigen-binding domain to thereby efficiently produce the polypeptide of the present invention. Furthermore, necessary antigen-binding domains can be efficiently obtained when the polypeptide of the present invention is prepared by use of a library including the single-domain antibody whose antigen-binding activity is inhibited by its association with particular VL, VH or VHH, as one example of the antigen-binding domain that can be used in the polypeptides of the present invention.

1. A polypeptide comprising an antigen-binding domain and a carrying moiety, wherein the carrying moiety has an inhibiting domain that inhibits the antigen-binding activity of the antigen-binding domain, and wherein the polypeptide has a protease cleavage sequence comprising one or a plurality of sequences selected from the sequences of SEQ ID NOs: 833 to 852 and SEQ ID NOs: 1062 to 1081 and the sequences described in Table 1.

2. The polypeptide of claim 1, wherein inhibition of antigen-binding activity of the antigen-binding domain by the inhibiting domain in a state where the protease cleavage sequence has been cleaved by a protease is weaker than the inhibition of antigen-binding activity of the antigen-binding domain by the inhibiting domain in a state where the protease cleavage sequence is uncleaved.

3. The polypeptide of claim 1 or 2, wherein the antigen-binding domain has a shorter half-life in blood than the carrying moiety.

4. The polypeptide of any one of claims 1 to 3, wherein the antigen-binding domain is capable of being released from the polypeptide, and wherein the antigen-binding domain has higher antigen-binding activity in a state where it is released from the polypeptide than antigen-binding activity in a state where it is not released from the polypeptide.

5. The polypeptide of any one of claims 1 to 4, wherein the antigen-binding activity of the antigen-binding domain is inhibited by the association of the inhibiting domain of the carrying moiety with the antigen-binding domain.

6. The polypeptide of claim 4 or 5, wherein the protease cleavage sequence is cleaved by a protease, so that the antigen-binding domain becomes capable of being released from the polypeptide or/and so that the association of the inhibiting domain of the carrying moiety with the antigen-binding domain is canceled.

7. The polypeptide of any one of claims 1 to 6, wherein the protease is a cancer tissue specific protease or an inflammatory tissue specific protease.

8. The polypeptide of anyone of claims 1 to 7, wherein the antigen-binding domain comprises a single-domain antibody or is a single-domain antibody, and wherein the inhibiting domain of the carrying moiety inhibits the antigen-binding activity of the single-domain antibody.

9. The polypeptide of anyone of claims 1 to 8, wherein the antigen-binding domain comprises a single-domain antibody, wherein the inhibiting domain of the carrying moiety is a VHH, an antibody VH, or an antibody VL, and wherein the antigen-binding activity of the single-domain antibody is inhibited by the VHH, the antibody VH, or the antibody VL.

10. The polypeptide of any one of claims 1 to 9, wherein the carrying moiety comprises an antibody constant region.

11. The polypeptide of claim 10, wherein the N terminus of the antibody constant region of the carrying moiety and the C terminus of the antigen-binding domain are fused via a linker or without a linker, and wherein the protease cleavage sequence is located near the boundary between the antigen-binding domain and the antibody constant region.

12. The polypeptide of claim 10 or 11, wherein the antibody constant region of the polypeptide is an IgG antibody constant region.

13. The polypeptide of any one of claims 1 to 12, wherein the polypeptide is an IgG antibody-like molecule.

14. A pharmaceutical composition comprising the polypeptide of anyone of claims 1 to 13.

15. A method for producing the polypeptide of any one of claims 1 to 13.

The application's sequence listing, which the Patent Office published only in electronic form, follows.

SEQUENCE LISTING (1061 sequences)

SEQ ID NO: 1 - protein, 127 aa, Artificial sequence
  an artificially synthesized sequence
EVQLVESGGGLVQPGGSLRLSCAASGFTFDDYGMSWVRQAPGKALEWVSAISWNGNNTYYTESMKGRFTISRDNAKNTLYLQMNSLRPEDTAVYYCVKGSTAIVGVPPTYPDEYDYWGQGTLVTVSS

SEQ ID NO: 2 - protein, 455 aa, Artificial sequence
  an artificially synthesized sequence
EVQLVESGGGLVQPGGSLRLSCAASGFTFDDYGMSWVRQAPGKALEWVSAISWNGNNTYYTESMKGRFTISRDNAKNTLYLQMNSLRPEDTAVYYCVKGSTAIVGVPPTYPDEYDYWGQGTLVTVSSASTKGPSVFPLAPSSKSTSGGTAALGCLVKDYFPEPVTVSWNSGALTSGVHTFPAVLQSSGLYSLSSVVTVPSSSLGTQTYICNVNHKPSNTKVDKKVEPKSCDKTHTCPPCPAPELLGGPSVFLFPPKPKDTLMISRTPEVTCVVVDVSHEDPEVKFNWYVDGVEVHNAKTKPREEQYNSTYRVVSVLTVLHQDWLNGKEYKCKVSNKALPAPIEKTISKAKGQPREPQVYTLPPSREEMTKNQVSLTCLVKGFYPSDIAVEWESNGQPENNYKTTPPVLDSDGSFFLYSKLTVDKSRWQQGNVFSCSVMHEALHNHYTQKSLSLSP

SEQ ID NO: 3 - protein, 214 aa, Artificial sequence
  an artificially synthesized sequence
DIQMTQSPSSLSASVGDRVTITCRASQSISSYLNWYQQKPGKAPKLLIYAASSLQSGVPSRFSGSGSGTDFTLTISSLQPEDFATYYCLQFDSYPLTFGGGTKVEIKRTVAAPSVFIFPPSDEQLKSGTASVVCLLNNFYPREAKVQWKVDNALQSGNSQESVTEQDSKDSTYSLSSTLTLSKADYEKHKVYACEVTHQGLSSPVTKSFNRGEC

SEQ ID NO: 4 - protein, 219 aa, Artificial sequence
  an artificially synthesized sequence
DIVMTQSPLSLPVTPGEPASISCRSSQSLLHSNGYNYLDWYLQKPGQSPQLLIYLGSNRASGVPDRFSGSGSGTDFTLKISRVEAEDVGVYYCMQRLHWPLTFGGGTKVEIKRTVAAPSVFIFPPSDEQLKSGTASVVCLLNNFYPREAKVQWKVDNALQSGNSQESVTEQDSKDSTYSLSSTLTLSKADYEKHKVYACEVTHQGLSSPVTKSFNRGEC

SEQ ID NO: 5 - protein, 215 aa, Artificial sequence
  an artificially synthesized sequence
EIVLTQSPGTLSLSPGERATLSCRASQSVSSSYLAWYQQKPGQAPRLLIYGASSRATGIPDRFSGSGSGTDFTLTISRLEPEDFAVYYCQQYGRSPLTFGGGTKVEIKRTVAAPSVFIFPPSDEQLKSGTASVVCLLNNFYPREAKVQWKVDNALQSGNSQESVTEQDSKDSTYSLSSTLTLSKADYEKHKVYACEVTHQGLSSPVTKSFNRGEC

SEQ ID NO: 6 - protein, 217 aa, Artificial sequence
  an artificially synthesized sequence
QSVLTQPPSVSGAPGQRVTISCTGSSSNIGAGYDVHWYQQLPGTAPKLLIYGNSNRPSGVPDRFSGSKSGTSASLAITGLQAEDEADYYCQSYDNSLNAVVFGGGTKLTVLGQPKAAPSVTLFPPSSEELQANKATLVCLISDFYPGAVTVAWKADSSPVKAGVETTTPSKQSNNKYAASSYLSLTPEQWKSHRSYSCQVTHEGSTVEKTVAPTECS

SEQ ID NO: 7 - protein, 216 aa, Artificial sequence
  an artificially synthesized sequence
QSVLTQPPSASGTPGQRVTISCSGSSSNIGSNTVNWYQQLPGTAPKLLIYSNNQRPSGVPDRFSGSKSGTSASLAISGLQSEDEADYYCGTWDGGVTGVVFGGGTKLTVLGQPKAAPSVTLFPPSSEELQANKATLVCLISDFYPGAVTVAWKADSSPVKAGVETTTPSKQSNNKYAASSYLSLTPEQWKSHRSYSCQVTHEGSTVEKTVAPTECS

SEQ ID NO: 8 - protein, 217 aa, Artificial sequence
  an artificially synthesized sequence
QSALTQPASVSGSPGQSITISCTGTSSDVGGYNYVSWYQQHPGKAPKLMIYEVSNRPSGVSNRFSGSKSGNTASLTISGLQAEDEADYYCSSYRSGYTLVVFGGGTKLTVLGQPKAAPSVTLFPPSSEELQANKATLVCLISDFYPGAVTVAWKADSSPVKAGVETTTPSKQSNNKYAASSYLSLTPEQWKSHRSYSCQVTHEGSTVEKTVAPTECS

SEQ ID NO: 9 - protein, 213 aa, Artificial sequence
  an artificially synthesized sequence
SYVLTQPPSVSVAPGKTARITCGGNNIGSKSVHWYQQKPGQAPVLVIYYDSDRPSGIPERFSGSNSGNTATLTISRVEAGDEADYYCQAWDSSTDVVFGGGTKLTVLGQPKAAPSVTLFPPSSEELQANKATLVCLISDFYPGAVTVAWKADSSPVKAGVETTTPSKQSNNKYAASSYLSLTPEQWKSHRSYSCQVTHEGSTVEKTVAPTECS

SEQ ID NO: 10 - protein, 107 aa, Homo sapiens [sequence omitted]

SEQ ID NO: 11 - protein, 106 aa, Homo sapiens
GQPKAAPSVTLFPPSSEELQANKATLVCLISDFYPGAVTVAWKADSSPVKAGVETTTPSKQSNNKYAASSYLSLTPEQWKSHRSYSCQVTHEGSTVEKTVAPTECS

SEQ ID NO: 12 - protein, 8 aa, Artificial sequence
  an artificially synthesized sequence
LSGRSDNH

SEQ ID NO: 13 - protein, 463 aa, Artificial sequence
  an artificially synthesized sequence
EVQLVESGGGLVQPGGSLRLSCAASGFTFDDYGMSWVRQAPGKALEWVSAISWNGNNTYYTESMKGRFTISRDNAKNTLYLQMNSLRPEDTAVYYCVKGSTAIVGVPPTYPDEYDYWGQGTLVTVSSASLSGRSDNHTKGPSVFPLAPSSKSTSGGTAALGCLVKDYFPEPVTVSWNSGALTSGVHTFPAVLQSSGLYSLSSVVTVPSSSLGTQTYICNVNHKPSNTKVDKKVEPKSCDKTHTCPPCPAPELLGGPSVFLFPPKPKDTLMISRTPEVTCVVVDVSHEDPEVKFNWYVDGVEVHNAKTKPREEQYNSTYRVVSVLTVLHQDWLNGKEYKCKVSNKALPAPIEKTISKAKGQPREPQVYTLPPSREEMTKNQVSLTCLVKGFYPSDIAVEWESNGQPENNYKTTPPVLDSDGSFFLYSKLTVDKSRWQQGNVFSCSVMHEALHNHYTQKSLSLSP

SEQ ID NO: 14 - protein, 473 aa, Artificial sequence
  an artificially synthesized sequence
EVQLVESGGGLVQPGGSLRLSCAASGFTFDDYGMSWVRQAPGKALEWVSAISWNGNNTYYTESMKGRFTISRDNAKNTLYLQMNSLRPEDTAVYYCVKGSTAIVGVPPTYPDEYDYWGQGTLVTVSSASSGGSGLSGRSDNHGSSGGTKGPSVFPLAPSSKSTSGGTAALGCLVKDYFPEPVTVSWNSGALTSGVHTFPAVLQSSGLYSLSSVVTVPSSSLGTQTYICNVNHKPSNTKVDKKVEPKSCDKTHTCPPCPAPELLGGPSVFLFPPKPKDTLMISRTPEVTCVVVDVSHEDPEVKFNWYVDGVEVHNAKTKPREEQYNSTYRVVSVLTVLHQDWLNGKEYKCKVSNKALPAPIEKTISKAKGQPREPQVYTLPPSREEMTKNQVSLTCLVKGFYPSDIAVEWESNGQPENNYKTTPPVLDSDGSFFLYSKLTVDKSRWQQGNVFSCSVMHEALHNHYTQKSLSLSP

SEQ ID NO: 15 - protein, 464 aa, Artificial sequence
  an artificially synthesized sequence
EVQLVESGGGLVQPGGSLRLSCAASGFTFDDYGMSWVRQAPGKALEWVSAISWNGNNTYYTESMKGRFTISRDNAKNTLYLQMNSLRPEDTAVYYCVKGSTAIVGVPPTYPDEYDYWGQGTLVTVLSGRSDNHGSSASTKGPSVFPLAPSSKSTSGGTAALGCLVKDYFPEPVTVSWNSGALTSGVHTFPAVLQSSGLYSLSSVVTVPSSSLGTQTYICNVNHKPSNTKVDKKVEPKSCDKTHTCPPCPAPELLGGPSVFLFPPKPKDTLMISRTPEVTCVVVDVSHEDPEVKFNWYVDGVEVHNAKTKPREEQYNSTYRVVSVLTVLHQDWLNGKEYKCKVSNKALPAPIEKTISKAKGQPREPQVYTLPPSREEMTKNQVSLTCLVKGFYPSDIAVEWESNGQPENNYKTTPPVLDSDGSFFLYSKLTVDKSRWQQGNVFSCSVMHEALHNHYTQKSLSLSP

SEQ ID NO: 16 - protein, 473 aa, Artificial sequence
  an artificially synthesized sequence
EVQLVESGGGLVQPGGSLRLSCAASGFTFDDYGMSWVRQAPGKALEWVSAISWNGNNTYYTESMKGRFTISRDNAKNTLYLQMNSLRPEDTAVYYCVKGSTAIVGVPPTYPDEYDYWGQGTLVTVSGGSGLSGRSDNHGSSGGSSASTKGPSVFPLAPSSKSTSGGTAALGCLVKDYFPEPVTVSWNSGALTSGVHTFPAVLQSSGLYSLSSVVTVPSSSLGTQTYICNVNHKPSNTKVDKKVEPKSCDKTHTCPPCPAPELLGGPSVFLFPPKPKDTLMISRTPEVTCVVVDVSHEDPEVKFNWYVDGVEVHNAKTKPREEQYNSTYRVVSVLTVLHQDWLNGKEYKCKVSNKALPAPIEKTISKAKGQPREPQVYTLPPSREEMTKNQVSLTCLVKGFYPSDIAVEWESNGQPENNYKTTPPVLDSDGSFFLYSKLTVDKSRWQQGNVFSCSVMHEALHNHYTQKSLSLSP

SEQ ID NO: 17 - protein, 464 aa, Artificial sequence
  an artificially synthesized sequence
EVQLVESGGGLVQPGGSLRLSCAASGFTFDDYGMSWVRQAPGKALEWVSAISWNGNNTYYTESMKGRFTISRDNAKNTLYLQMNSLRPEDTAVYYCVKGSTAIVGVPPTYPDEYDYWGQGTLVTVSSASTKLSGRSDNHGGPSVFPLAPSSKSTSGGTAALGCLVKDYFPEPVTVSWNSGALTSGVHTFPAVLQSSGLYSLSSVVTVPSSSLGTQTYICNVNHKPSNTKVDKKVEPKSCDKTHTCPPCPAPELLGGPSVFLFPPKPKDTLMISRTPEVTCVVVDVSHEDPEVKFNWYVDGVEVHNAKTKPREEQYNSTYRVVSVLTVLHQDWLNGKEYKCKVSNKALPAPIEKTISKAKGQPREPQVYTLPPSREEMTKNQVSLTCLVKGFYPSDIAVEWESNGQPENNYKTTPPVLDSDGSFFLYSKLTVDKSRWQQGNVFSCSVMHEALHNHYTQKSLSLSP

SEQ ID NO: 18 - protein, 473 aa, Artificial sequence
  an artificially synthesized sequence
EVQLVESGGGLVQPGGSLRLSCAASGFTFDDYGMSWVRQAPGKALEWVSAISWNGNNTYYTESMKGRFTISRDNAKNTLYLQMNSLRPEDTAVYYCVKGSTAIVGVPPTYPDEYDYWGQGTLVTVSSASTKSGGSGLSGRSDNHGSSGGGPSVFPLAPSSKSTSGGTAALGCLVKDYFPEPVTVSWNSGALTSGVHTFPAVLQSSGLYSLSSVVTVPSSSLGTQTYICNVNHKPSNTKVDKKVEPKSCDKTHTCPPCPAPELLGGPSVFLFPPKPKDTLMISRTPEVTCVVVDVSHEDPEVKFNWYVDGVEVHNAKTKPREEQYNSTYRVVSVLTVLHQDWLNGKEYKCKVSNKALPAPIEKTISKAKGQPREPQVYTLPPSREEMTKNQVSLTCLVKGFYPSDIAVEWESNGQPENNYKTTPPVLDSDGSFFLYSKLTVDKSRWQQGNVFSCSVMHEALHNHYTQKSLSLSP

SEQ ID NO: 19 - protein, 121 aa, Artificial sequence [sequence omitted]

SEQ ID NO: 20 - protein, 121 aa, Artificial sequence
  an artificially synthesized sequence
EVQLVESGGGLVQPGGSLRLSCAASGSVFKINVMAWVRQAPGKGLEWVAGIISGGSTSYADSVKGRFTISRDNAKNTLYLQMNSLRPEDTAVYYCAFITTESDYDLGRRYWGQGTLVTVSS

SEQ ID NO: 21 - protein, 330 aa, Homo sapiens [sequence omitted]

SEQ ID NO: 22 - protein, 326 aa, Homo sapiens
ASTKGPSVFPLAPCSRSTSESTAALGCLVKDYFPEPVTVSWNSGALTSGVHTFPAVLQSSGLYSLSSVVTVPSSNFGTQTYTCNVDHKPSNTKVDKTVERKCCVECPPCPAPPVAGPSVFLFPPKPKDTLMISRTPEVTCVVVDVSHEDPEVQFNWYVDGVEVHNAKTKPREEQFNSTFRVVSVLTVVHQDWLNGKEYKCKVSNKGLPAPIEKTISKTKGQPREPQVYTLPPSREEMTKNQVSLTCLVKGFYPSDIAVEWESNGQPENNYKTTPPMLDSDGSFFLYSKLTVDKSRWQQGNVFSCSVMHEALHNHYTQKSLSLSPGK

SEQ ID NO: 23 - protein, 377 aa, Homo sapiens
ASTKGPSVFPLAPCSRSTSGGTAALGCLVKDYFPEPVTVSWNSGALTSGVHTFPAVLQSSGLYSLSSVVTVPSSSLGTQTYTCNVNHKPSNTKVDKRVELKTPLGDTTHTCPRCPEPKSCDTPPPCPRCPEPKSCDTPPPCPRCPEPKSCDTPPPCPRCPAPELLGGPSVFLFPPKPKDTLMISRTPEVTCVVVDVSHEDPEVQFKWYVDGVEVHNAKTKPREEQYNSTFRVVSVLTVLHQDWLNGKEYKCKVSNKALPAPIEKTISKTKGQPREPQVYTLPPSREEMTKNQVSLTCLVKGFYPSDIAVEWESSGQPENNYNTTPPMLDSDGSFFLYSKLTVDKSRWQQGNIFSCSVMHEALHNRFTQKSLSLSPGK

SEQ ID NO: 24 - protein, 327 aa, Homo sapiens
ASTKGPSVFPLAPCSRSTSESTAALGCLVKDYFPEPVTVSWNSGALTSGVHTFPAVLQSSGLYSLSSVVTVPSSSLGTKTYTCNVDHKPSNTKVDKRVESKYGPPCPSCPAPEFLGGPSVFLFPPKPKDTLMISRTPEVTCVVVDVSQEDPEVQFNWYVDGVEVHNAKTKPREEQFNSTYRVVSVLTVLHQDWLNGKEYKCKVSNKGLPSSIEKTISKAKGQPREPQVYTLPPSQEEMTKNQVSLTCLVKGFYPSDIAVEWESNGQPENNYKTTPPVLDSDGSFFLYSRLTVDKSRWQEGNVFSCSVMHEALHNHYTQKSLSLSLGK

SEQ ID NO: 25 - protein, 6 aa, Artificial sequence
  an artificially synthesized sequence
PLGLAG

SEQ ID NO: 26 - protein, 8 aa, Artificial sequence
  an artificially synthesized sequence
VPLSLTMG

SEQ ID NO: 27 - protein, 5 aa, Artificial sequence
  an artificially synthesized sequence
GSGGS

SEQ ID NO: 28 - protein, 4 aa, Artificial sequence
  an artificially synthesized sequence
GGGS

SEQ ID NO: 29 - protein, 4 aa, Artificial sequence
  an artificially synthesized sequence
GGSG

SEQ ID NO: 30 - protein, 5 aa, Artificial sequence
  an artificially synthesized sequence
GGSGG

SEQ ID NO: 31 - protein, 5 aa, Artificial sequence
  an artificially synthesized sequence
GSGSG

SEQ ID NO: 32 - protein, 5 aa, Artificial sequence
  an artificially synthesized sequence
GSGGG

SEQ ID NO: 33 - protein, 5 aa, Artificial sequence
  an artificially synthesized sequence
GGGSG

SEQ ID NO: 34 - protein, 5 aa, Artificial sequence
  an artificially synthesized sequence
GSSSG

SEQ ID NO: 35 - protein, 338 aa, Homo sapiens
LAPRRCPAQEVARGVLTSLPGDSVTLTCPGVEPEDNATVHWVLRKPAAGSHPSRWAGMGRRLLLRSVQLHDSGNYSCYRAGRPAGTVHLLVDVPPEEPQLSCFRKSPLSNVVCEWGPRSTPSLTTKAVLLVRKFQNSPAEDFQEPCQYSQESQKFSCQLAVPEGDSSFYIVSMCVASSVGSKFSKTQTFQGCGILQPDPPANITVTAVARNPRWLSVTWQDPHSWNSSFYRLRFELRYRAERSKTFTTWMVKDLQHHCVIHDAWSGLRHVVQLRAQEEFGQGEWSEWSPEAMGTPWTESRSPPAENEVSTPMQALTTNKDDDNILFRDSANATSLPVQ

SEQ ID NO: 36 - protein, 15 aa, Artificial sequence
  an artificially synthesized sequence
GLNDIFEAQKIEWHE

SEQ ID NO: 37 - protein, 358 aa, Artificial sequence
  an artificially synthesized sequence
LAPRRCPAQEVARGVLTSLPGDSVTLTCPGVEPEDNATVHWVLRKPAAGSHPSRWAGMGRRLLLRSVQLHDSGNYSCYRAGRPAGTVHLLVDVPPEEPQLSCFRKSPLSNVVCEWGPRSTPSLTTKAVLLVRKFQNSPAEDFQEPCQYSQESQKFSCQLAVPEGDSSFYIVSMCVASSVGSKFSKTQTFQGCGILQPDPPANITVTAVARNPRWLSVTWQDPHSWNSSFYRLRFELRYRAERSKTFTTWMVKDLQHHCVIHDAWSGLRHVVQLRAQEEFGQGEWSEWSPEAMGTPWTESRSPPAENEVSTPMQALTTNKDDDNILFRDSANATSLPVQGGGGSGLNDIFEAQKIEWHE

SEQ ID NO: 38 - protein, 449 aa, Artificial sequence
  an artificially synthesized sequence
EVQLVESGGGLVQPGGSLRLSCAASGSVFKINVMAWYRQAPGKGRELVAGIISGGSTSYADSVKGRFTISRDNAKNTLYLQMNSLRPEDTAVYYCAFITTESDYDLGRRYWGQGTLVTVSSASTKGPSVFPLAPSSKSTSGGTAALGCLVKDYFPEPVTVSWNSGALTSGVHTFPAVLQSSGLYSLSSVVTVPSSSLGTQTYICNVNHKPSNTKVDKKVEPKSCDKTHTCPPCPAPELLGGPSVFLFPPKPKDTLMISRTPEVTCVVVDVSHEDPEVKFNWYVDGVEVHNAKTKPREEQYNSTYRVVSVLTVLHQDWLNGKEYKCKVSNKALPAPIEKTISKAKGQPREPQVYTLPPSREEMTKNQVSLTCLVKGFYPSDIAVEWESNGQPENNYKTTPPVLDSDGSFFLYSKLTVDKSRWQQGNVFSCSVMHEALHNHYTQKSLSLSP

SEQ ID NO: 39 - protein, 449 aa, Artificial sequence
  an artificially synthesized sequence
EVQLVESGGGLVQPGGSLRLSCAASGSVFKINVMAWVRQAPGKGLEWVAGIISGGSTSYADSVKGRFTISRDNAKNTLYLQMNSLRPEDTAVYYCAFITTESDYDLGRRYWGQGTLVTVSSASTKGPSVFPLAPSSKSTSGGTAALGCLVKDYFPEPVTVSWNSGALTSGVHTFPAVLQSSGLYSLSSVVTVPSSSLGTQTYICNVNHKPSNTKVDKKVEPKSCDKTHTCPPCPAPELLGGPSVFLFPPKPKDTLMISRTPEVTCVVVDVSHEDPEVKFNWYVDGVEVHNAKTKPREEQYNSTYRVVSVLTVLHQDWLNGKEYKCKVSNKALPAPIEKTISKAKGQPREPQVYTLPPSREEMTKNQVSLTCLVKGFYPSDIAVEWESNGQPENNYKTTPPVLDSDGSFFLYSKLTVDKSRWQQGNVFSCSVMHEALHNHYTQKSLSLSP

SEQ ID NO: 40 - protein, 457 aa, Artificial sequence
  an artificially synthesized sequence
EVQLVESGGGLVQPGGSLRLSCAASGSVFKINVMAWYRQAPGKGRELVAGIISGGSTSYADSVKGRFTISRDNAKNTLYLQMNSLRPEDTAVYYCAFITTESDYDLGRRYWGQGTLVTVSSASLSGRSDNHTKGPSVFPLAPSSKSTSGGTAALGCLVKDYFPEPVTVSWNSGALTSGVHTFPAVLQSSGLYSLSSVVTVPSSSLGTQTYICNVNHKPSNTKVDKKVEPKSCDKTHTCPPCPAPELLGGPSVFLFPPKPKDTLMISRTPEVTCVVVDVSHEDPEVKFNWYVDGVEVHNAKTKPREEQYNSTYRVVSVLTVLHQDWLNGKEYKCKVSNKALPAPIEKTISKAKGQPREPQVYTLPPSREEMTKNQVSLTCLVKGFYPSDIAVEWESNGQPENNYKTTPPVLDSDGSFFLYSKLTVDKSRWQQGNVFSCSVMHEALHNHYTQKSLSLSP

SEQ ID NO: 41 - protein, 467 aa, Artificial sequence
  an artificially synthesized sequence
EVQLVESGGGLVQPGGSLRLSCAASGSVFKINVMAWYRQAPGKGRELVAGIISGGSTSYADSVKGRFTISRDNAKNTLYLQMNSLRPEDTAVYYCAFITTESDYDLGRRYWGQGTLVTVSSASSGGSGLSGRSDNHGSSGGTKGPSVFPLAPSSKSTSGGTAALGCLVKDYFPEPVTVSWNSGALTSGVHTFPAVLQSSGLYSLSSVVTVPSSSLGTQTYICNVNHKPSNTKVDKKVEPKSCDKTHTCPPCPAPELLGGPSVFLFPPKPKDTLMISRTPEVTCVVVDVSHEDPEVKFNWYVDGVEVHNAKTKPREEQYNSTYRVVSVLTVLHQDWLNGKEYKCKVSNKALPAPIEKTISKAKGQPREPQVYTLPPSREEMTKNQVSLTCLVKGFYPSDIAVEWESNGQPENNYKTTPPVLDSDGSFFLYSKLTVDKSRWQQGNVFSCSVMHEALHNHYTQKSLSLSP

SEQ ID NO: 42 - protein, 467 aa, Artificial sequence
  an artificially synthesized sequence
EVQLVESGGGLVQPGGSLRLSCAASGSVFKINVMAWYRQAPGKGRELVAGIISGGSTSYADSVKGRFTISRDNAKNTLYLQMNSLRPEDTAVYYCAFITTESDYDLGRRYWGQGTLVTVSGGSGLSGRSDNHGSSGGSSASTKGPSVFPLAPSSKSTSGGTAALGCLVKDYFPEPVTVSWNSGALTSGVHTFPAVLQSSGLYSLSSVVTVPSSSLGTQTYICNVNHKPSNTKVDKKVEPKSCDKTHTCPPCPAPELLGGPSVFLFPPKPKDTLMISRTPEVTCVVVDVSHEDPEVKFNWYVDGVEVHNAKTKPREEQYNSTYRVVSVLTVLHQDWLNGKEYKCKVSNKALPAPIEKTISKAKGQPREPQVYTLPPSREEMTKNQVSLTCLVKGFYPSDIAVEWESNGQPENNYKTTPPVLDSDGSFFLYSKLTVDKSRWQQGNVFSCSVMHEALHNHYTQKSLSLSP

SEQ ID NO: 43 - protein, 467 aa, Artificial sequence
  an artificially synthesized sequence
EVQLVESGGGLVQPGGSLRLSCAASGSVFKINVMAWYRQAPGKGRELVAGIISGGSTSYADSVKGRFTISRDNAKNTLYLQMNSLRPEDTAVYYCAFITTESDYDLGRRYWGQGTLVTVSSASTKSGGSGLSGRSDNHGSSGGGPSVFPLAPSSKSTSGGTAALGCLVKDYFPEPVTVSWNSGALTSGVHTFPAVLQSSGLYSLSSVVTVPSSSLGTQTYICNVNHKPSNTKVDKKVEPKSCDKTHTCPPCPAPELLGGPSVFLFPPKPKDTLMISRTPEVTCVVVDVSHEDPEVKFNWYVDGVEVHNAKTKPREEQYNSTYRVVSVLTVLHQDWLNGKEYKCKVSNKALPAPIEKTISKAKGQPREPQVYTLPPSREEMTKNQVSLTCLVKGFYPSDIAVEWESNGQPENNYKTTPPVLDSDGSFFLYSKLTVDKSRWQQGNVFSCSVMHEALHNHYTQKSLSLSP

SEQ ID NO: 44 - protein, 18 aa, Artificial sequence
  an artificially synthesized sequence
SGGSGLSGRSDNHGSSGG

SEQ ID NO: 45 - protein, 9 aa, Artificial sequence
  an artificially synthesized sequence
LSGRSDNHG

SEQ ID NO: 46 - protein, 4 aa, Artificial sequence
  an artificially synthesized sequence
GSGG

SEQ ID NO: 47 - protein, 4 aa, Artificial sequence
  an artificially synthesized sequence
SGGG

SEQ ID NO: 48 - protein, 4 aa, Artificial sequence
  an artificially synthesized sequence
GSSG

SEQ ID NO: 49 - protein, 5 aa, Artificial sequence
  an artificially synthesized sequence
GGGGS

SEQ ID NO: 50 - protein, 6 aa, Artificial sequence
  an artificially synthesized sequence
GGGGGS

SEQ ID NO: 51 - protein, 5 aa, Artificial sequence
  an artificially synthesized sequence
SGGGG

SEQ ID NO: 52 - protein, 5 aa, Artificial sequence
  an artificially synthesized sequence
GSSGG

SEQ ID NO: 53 - protein, 5 aa, Artificial sequence
  an artificially synthesized sequence
SGGSG

SEQ ID NO: 54 - protein, 6 aa, Artificial sequence
  an artificially synthesized sequence
SGGGGG

SEQ ID NO: 55 - protein, 7 aa, Artificial sequence
  an artificially synthesized sequence
GGGGGGS

SEQ ID NO: 56 - protein, 7 aa, Artificial sequence
  an artificially synthesized sequence
SGGGGGG

SEQ ID NO: 57 - protein, 641 aa, Epstein-Barr virus (EBV)
MSDEGPGTGPGNGLGEKGDTSGPEGSGGSGPQRRGGDNHGRGRGRGRGRGGGRPGAPGGSGSGPRHRDGVRRPQKRPSCIGCKGTHGGTGAGAGAGGAGAGGAGAGGGAGAGGGAGGAGGAGGAGAGGGAGAGGGAGGAGGAGAGGGAGAGGGAGGAGAGGGAGGAGGAGAGGGAGAGGGAGGAGAGGGAGGAGGAGAGGGAGAGGAGGAGGAGAGGAGAGGGAGGAGGAGAGGAGAGGAGAGGAGAGGAGGAGAGGAGGAGAGGAGGAGAGGGAGGAGAGGGAGGAGAGGAGGAGAGGAGGAGAGGAGGAGAGGGAGAGGAGAGGGGRGRGGSGGRGRGGSGGRGRGGSGGRRGRGRERARGGSRERARGRGRGRGEKRPRSPSSQSSSSGSPPRRPPPGRRPFFHPVGEADYFEYHQEGGPDGEPDVPPGAIEQGPADDPGEGPSTGPRGQGDGGRRKKGGWFGKHRGQGGSNPKFENIAEGLRALLARSHVERTTDEGTWVAGVFVYGGSKTSLYNLRRGTALAIPQCRLTPLSRLPFGMAPGPGPQPGPLRESIVCYFMVFLQTHIFAEVLKDAIKDLVMTKPAPTCNIRVTVCSFDDGVDLPPWFPPMVEGAAAEGDDGDDGDEGGDGDEGEEGQE

SEQ ID NO: 58 - protein, 321 aa, Escherichia coli
MKDNTVPLKLIALLANGEFHSGEQLGETLGMSRAAINKHIQTLRDWGVDVFTVPGKGYSLPEPIQLLNAKQILGQLDGGSVAVLPVIDSTNQYLLDRIGELKSGDACIAEYQQAGRGRRGRKWFSPFGANLYLSMFWRLEQGPAAAIGLSLVIGIVMAEVLRKLGADKVRVKWPNDLYLQDRKLAGILVELTGKTGDAAQIVIGAGINMAMRRVEESVVNQGWITLQEAGINLDRNTLAAMLIRELRAALELFEQEGLAPYLSRWEKLDNFINRPVKLIIGDKEIFGISRGIDKQGALLLEQDGIIKPWMGGEISLRSAEK

SEQ ID NO: 59 - protein, 373 aa, Artificial sequence
  an artificially synthesized sequence
QDGNEEMGGITQTPYKVSISGTTVILTCPQYPGSEILWQHNDKNIGGDEDDKNIGSDEDHLSLKEFSELEQSGYYVCYPRGSKPEDANFYLYLRARVCENCMEMDDIEGRMDPKSCDKTHTCPPCPAPELLGGPSVFLFPPKPKDTLMISRTPEVTCVVVDVSHEDPEVKFNWYVDGVEVHNAKTKPREEQYNSTYRVVSVLTVLHQDWLNGKEYKCKVSNKALPAPIEKTISKAKGQPREPQVCTLPPSRDELTKNQVSLWCLVKGFYPSDIAVEWESNGQPENNYKTTPPVLDSDGSFFLYSKLTVDKSRWQQGNVFSCSVMHEALHNHYTQKSLSLSPGGSGGSGENLYFQGSGGGLNDIFEAQKIEWHE

SEQ ID NO: 60 - protein, 323 aa, Artificial sequence
  an artificially synthesized sequence
FKIPIEELEDRVFVNCNTSITWVEGTVGTLLSDITRLDLGKRILDPRGIYRCNGTDIYKDKESTVQVHYRMCQSCVELDDIEGRMDPKSCDKTHTCPPCPAPELLGGPSVFLFPPKPKDTLMISRTPEVTCVVVDVSHEDPEVKFNWYVDGVEVHNAKTKPREEQYNSTYRVVSVLTVLHQDWLNGKEYKCKVSNKALPAPIEKTISKAKGQPREPQVYTLPPSRCELTKNQVSLSCAVKGFYPSDIAVEWESNGQPENNYKTTPPVLDSDGSFFLVSKLTVDKSRWQQGNVFSCSVMHEALHNHYTQKSLSLSPDYKDDDDK

SEQ ID NO: 61 - protein, 123 aa, Vicugna pacos
QVQLVESGGGLVQPGGSLRLSCAASGFTFNHCWMYWVRQAPGKGLEWVSVINTDGGSAYYADSVKGRFTISRDNAKNTLYLQMNSLKSEDTAVYYCARDWAPLVDYYYGMDYWGKGTLVTVSG

SEQ ID NO: 62 - protein, 121 aa, Vicugna pacos
QVQLVESGGGLVQPGGSLRLSCAASGFPFDNYVMSWVRQAPGKGLEWISAISWNGGSTYYAESMKGRFTISRDNAKSTLYLQMNSLKSEDTAVYYCAKEPRVYYSGSPDYWGQGTQVTVSG

SEQ ID NO: 63 - protein, 118 aa, Vicugna pacos
QVQLVESGGGLVQPGGSLRLSCAASGFTFDVYGMSWVRHSPGKGLEWVSTINWNGGSTYYAESMKGRFTISRDNAKNTVYLQMNSLKPEDTAVYYCAKFAPWDGDMEWGQGTQVTVSG

SEQ ID NO: 64 - protein, 469 aa, Artificial sequence
  an artificially synthesized sequence
QVQLVESGGGLVQPGGSLRLSCAASGFTFNHCWMYWVRQAPGKGLEWVSVINTDGGSAYYADSVKGRFTISRDNAKNTLYLQMNSLKSEDTAVYYCARDWAPLVDYYYGMDYWGKGTLVTVSGGSGLSGRSDNHGSSGGSSASTKGPSVFPLAPSSKSTSGGTAALGCLVKDYFPEPVTVSWNSGALTSGVHTFPAVLQSSGLYSLSSVVTVPSSSLGTQTYICNVNHKPSNTKVDKKVEPKSCDKTHTCPPCPAPELLGGPSVFLFPPKPKDTLMISRTPEVTCVVVDVSHEDPEVKFNWYVDGVEVHNAKTKPREEQYNSTYRVVSVLTVLHQDWLNGKEYKCKVSNKALPAPIEKTISKAKGQPREPQVYTLPPSREEMTKNQVSLTCLVKGFYPSDIAVEWESNGQPENNYKTTPPVLDSDGSFFLYSKLTVDKSRWQQGNVFSCSVMHEALHNHYTQKSLSLSP

SEQ ID NO: 65 - protein, 467 aa, Artificial sequence
  an artificially synthesized sequence
QVQLVESGGGLVQPGGSLRLSCAASGFPFDNYVMSWVRQAPGKGLEWISAISWNGGSTYYAESMKGRFTISRDNAKSTLYLQMNSLKSEDTAVYYCAKEPRVYYSGSPDYWGQGTQVTVSGGSGLSGRSDNHGSSGGSSASTKGPSVFPLAPSSKSTSGGTAALGCLVKDYFPEPVTVSWNSGALTSGVHTFPAVLQSSGLYSLSSVVTVPSSSLGTQTYICNVNHKPSNTKVDKKVEPKSCDKTHTCPPCPAPELLGGPSVFLFPPKPKDTLMISRTPEVTCVVVDVSHEDPEVKFNWYVDGVEVHNAKTKPREEQYNSTYRVVSVLTVLHQDWLNGKEYKCKVSNKALPAPIEKTISKAKGQPREPQVYTLPPSREEMTKNQVSLTCLVKGFYPSDIAVEWESNGQPENNYKTTPPVLDSDGSFFLYSKLTVDKSRWQQGNVFSCSVMHEALHNHYTQKSLSLSP

SEQ ID NO: 66 - protein, 464 aa, Artificial sequence
  an artificially synthesized sequence
QVQLVESGGGLVQPGGSLRLSCAASGFTFDVYGMSWVRHSPGKGLEWVSTINWNGGSTYYAESMKGRFTISRDNAKNTVYLQMNSLKPEDTAVYYCAKFAPWDGDMEWGQGTQVTVSGGSGLSGRSDNHGSSGGSSASTKGPSVFPLAPSSKSTSGGTAALGCLVKDYFPEPVTVSWNSGALTSGVHTFPAVLQSSGLYSLSSVVTVPSSSLGTQTYICNVNHKPSNTKVDKKVEPKSCDKTHTCPPCPAPELLGGPSVFLFPPKPKDTLMISRTPEVTCVVVDVSHEDPEVKFNWYVDGVEVHNAKTKPREEQYNSTYRVVSVLTVLHQDWLNGKEYKCKVSNKALPAPIEKTISKAKGQPREPQVYTLPPSREEMTKNQVSLTCLVKGFYPSDIAVEWESNGQPENNYKTTPPVLDSDGSFFLYSKLTVDKSRWQQGNVFSCSVMHEALHNHYTQKSLSLSP

SEQ ID NO: 67 - protein, 222 aa, Artificial sequence
  an artificially synthesized sequence
DIQMTQSPSSLSASVGDRVTITCRASQSISSYLNWYQQKPGKAPKLLIYAASSLQSGVPSRFSGSGSGTDFTLTISSLQPEDFATYYCLQFDSYPLTFGGGTKVELSGRSDNHIKRTVAAPSVFIFPPSDEQLKSGTASVVCLLNNFYPREAKVQWKVDNALQSGNSQESVTEQDSKDSTYSLSSTLTLSKADYEKHKVYACEVTHQGLSSPVTKSFNRGEC

SEQ ID NO: 68 - protein, 222 aa, Artificial sequence
  an artificially synthesized sequence
DIQMTQSPSSLSASVGDRVTITCRASQSISSYLNWYQQKPGKAPKLLIYAASSLQSGVPSRFSGSGSGTDFTLTISSLQPEDFATYYCLQFDSYPLTFGGGTKVEILSGRSDNHKRTVAAPSVFIFPPSDEQLKSGTASVVCLLNNFYPREAKVQWKVDNALQSGNSQESVTEQDSKDSTYSLSSTLTLSKADYEKHKVYACEVTHQGLSSPVTKSFNRGEC

SEQ ID NO: 69 - protein, 222 aa, Artificial sequence
  an artificially synthesized sequence
DIQMTQSPSSLSASVGDRVTITCRASQSISSYLNWYQQKPGKAPKLLIYAASSLQSGVPSRFSGSGSGTDFTLTISSLQPEDFATYYCLQFDSYPLTFGGGTKVEIKLSGRSDNHRTVAAPSVFIFPPSDEQLKSGTASVVCLLNNFYPREAKVQWKVDNALQSGNSQESVTEQDSKDSTYSLSSTLTLSKADYEKHKVYACEVTHQGLSSPVTKSFNRGEC

SEQ ID NO: 70 - protein, 222 aa, Artificial sequence
  an artificially synthesized sequence
DIQMTQSPSSLSASVGDRVTITCRASQSISSYLNWYQQKPGKAPKLLIYAASSLQSGVPSRFSGSGSGTDFTLTISSLQPEDFATYYCLQFDSYPLTFGGGTKVEIKRTLSGRSDNHVAAPSVFIFPPSDEQLKSGTASVVCLLNNFYPREAKVQWKVDNALQSGNSQESVTEQDSKDSTYSLSSTLTLSKADYEKHKVYACEVTHQGLSSPVTKSFNRGEC

SEQ ID NO: 71 - protein, 222 aa, Artificial sequence
  an artificially synthesized sequence
DIQMTQSPSSLSASVGDRVTITCRASQSISSYLNWYQQKPGKAPKLLIYAASSLQSGVPSRFSGSGSGTDFTLTISSLQPEDFATYYCLQFDSYPLTFGGGTKVEIKRTVLSGRSDNHAAPSVFIFPPSDEQLKSGTASVVCLLNNFYPREAKVQWKVDNALQSGNSQESVTEQDSKDSTYSLSSTLTLSKADYEKHKVYACEVTHQGLSSPVTKSFNRGEC

SEQ ID NO: 72 - protein, 222 aa, Artificial sequence
  an artificially synthesized sequence
DIQMTQSPSSLSASVGDRVTITCRASQSISSYLNWYQQKPGKAPKLLIYAASSLQSGVPSRFSGSGSGTDFTLTISSLQPEDFATYYCLQFDSYPLTFGGGTKVEIKRTVALSGRSDNHAPSVFIFPPSDEQLKSGTASVVCLLNNFYPREAKVQWKVDNALQSGNSQESVTEQDSKDSTYSLSSTLTLSKADYEKHKVYACEVTHQGLSSPVTKSFNRGEC

SEQ ID NO: 73 - protein, 222 aa, Artificial sequence
  an artificially synthesized sequence
DIQMTQSPSSLSASVGDRVTITCRASQSISSYLNWYQQKPGKAPKLLIYAASSLQSGVPSRFSGSGSGTDFTLTISSLQPEDFATYYCLQFDSYPLTFGGGTKVEIKRTVAALSGRSDNHPSVFIFPPSDEQLKSGTASVVCLLNNFYPREAKVQWKVDNALQSGNSQESVTEQDSKDSTYSLSSTLTLSKADYEKHKVYACEVTHQGLSSPVTKSFNRGEC

SEQ ID NO: 74 - protein, 12 aa, Artificial sequence
  an artificially synthesized sequence
TSTSGRSANPRG

SEQ ID NO: 75 - protein, 13 aa, Artificial sequence
  an artificially synthesized sequence
ISSGLLSGRSDNH

SEQ ID NO: 76 - protein, 18 aa, Artificial sequence
  an artificially synthesized sequence
AVGLLAPPGGLSGRSDNH

SEQ ID NO: 77 - protein, 13 aa, Artificial sequence
  an artificially synthesized sequence
GAGVPMSMRGGAG

SEQ ID NO: 78 - protein, 13 aa, Artificial sequence
  an artificially synthesized sequence
GAGIPVSLRSGAG

SEQ ID NO: 79 - protein, 8 aa, Artificial sequence
  an artificially synthesized sequence
GPLGIAGQ

SEQ ID NO: 80 - protein, 10 aa, Artificial sequence
  an artificially synthesized sequence
GGPLGMLSQS

SEQ ID NO: 81 - protein, 6 aa, Artificial sequence
  an artificially synthesized sequence
PLGLWA

SEQ ID NO: 82 - protein, 13 aa, Artificial sequence
  an artificially synthesized sequence
GAGRPFSMIMGAG

SEQ ID NO: 83 - protein, 13 aa, Artificial sequence
  an artificially synthesized sequence
GAGVPLSLTMGAG

SEQ ID NO: 84 - protein, 13 aa, Artificial sequence
  an artificially synthesized sequence
GAGVPLSLYSGAG

SEQ ID NO: 85 - protein, 6 aa, Artificial sequence
  an artificially synthesized sequence
AANLRN

SEQ ID NO: 86 - protein, 6 aa, Artificial sequence
  an artificially synthesized sequence
AQAYVK

SEQ ID NO: 87 - protein, 6 aa, Artificial sequence
  an artificially synthesized sequence
AANYMR

SEQ ID NO: 88 - protein, 6 aa, Artificial sequence
  an artificially synthesized sequence
AAALTR

SEQ ID NO: 89 - protein, 6 aa, Artificial sequence
  an artificially synthesized sequence
AQNLMR

SEQ ID NO: 90 - protein, 6 aa, Artificial sequence
  an artificially synthesized sequence
AANYTK

SEQ ID NO: 91 - protein, 16 aa, Artificial sequence
  an artificially synthesized sequence
GAGPQGLAGQRGIVAG

SEQ ID NO: 92 - protein, 8 aa, Artificial sequence
  an artificially synthesized sequence
PRFKIIGG

SEQ ID NO: 93 - protein, 8 aa, Artificial sequence
  an artificially synthesized sequence
PRFRIIGG

SEQ ID NO: 94 - protein, 9 aa, Artificial sequence
  an artificially synthesized sequence
GAGSGRSAG

SEQ ID NO: 95 - protein, 5 aa, Artificial sequence
  an artificially synthesized sequence
SGRSA

SEQ ID NO: 96 - protein, 6 aa, Artificial sequence
  an artificially synthesized sequence
GSGRSA

SEQ ID NO: 97 - protein, 5 aa, Artificial sequence
  an artificially synthesized sequence
SGKSA

SEQ ID NO: 98 - protein, 5 aa, Artificial sequence
  an artificially synthesized sequence
SGRSS

SEQ ID NO: 99 - protein, 5 aa, Artificial sequence
  an artificially synthesized sequence
SGRRA

SEQ ID NO: 100 - protein, 5 aa, Artificial sequence
  an artificially synthesized sequence
SGRNA

SEQ ID NO: 101 - protein, 5 aa, Artificial sequence
  an artificially synthesized sequence
SGRKA

SEQ ID NO: 102 - protein, 6 aa, Artificial sequence
  an artificially synthesized sequence
QRGRSA

SEQ ID NO: 103 - protein, 17 aa, Artificial sequence
  an artificially synthesized sequence
GAGSLLKSRMVPNFNAG

SEQ ID NO: 104 - protein, 6 aa, Artificial sequence
  an artificially synthesized sequence
TQGAAA

SEQ ID NO: 105 - protein, 6 aa, Artificial sequence
  an artificially synthesized sequence
GAAAAA

SEQ ID NO: 106 - protein, 6 aa, Artificial sequence
  an artificially synthesized sequence
GAGAAG

SEQ ID NO: 107 - protein, 6 aa, Artificial sequence
  an artificially synthesized sequence
AAAAAG

SEQ ID NO: 108 - protein, 6 aa, Artificial sequence
  an artificially synthesized sequence
LCGAAI

SEQ ID NO: 109 - protein, 6 aa, Artificial sequence
  an artificially synthesized sequence
FAQALG

SEQ ID NO: 110 - protein, 6 aa, Artificial sequence
  an artificially synthesized sequence
LLQANP

SEQ ID NO: 111 - protein, 6 aa, Artificial sequence
  an artificially synthesized sequence
LAAANP

SEQ ID NO: 112 - protein, 6 aa, Artificial sequence
  an artificially synthesized sequence
LYGAQF

SEQ ID NO: 113 - protein, 6 aa, Artificial sequence
  an artificially synthesized sequence
LSQAQG

SEQ ID NO: 114 - protein, 6 aa, Artificial sequence
  an artificially synthesized sequence
ASAASG

SEQ ID NO: 115 - protein, 6 aa, Artificial sequence
  an artificially synthesized sequence
FLGASL

SEQ ID NO: 116 - protein, 6 aa, Artificial sequence
  an artificially synthesized sequence
AYGATG

SEQ ID NO: 117 - protein, 6 aa, Artificial sequence
  an artificially synthesized sequence
LAQATG

SEQ ID NO: 118 - protein, 17 aa, Artificial sequence
  an artificially synthesized sequence
GAGSGVVIATVIVITAG

SEQ ID NO: 119 - protein, 8 aa, Artificial sequence
  an artificially synthesized sequence
APMAEGGG

SEQ ID NO: 120 - protein, 8 aa, Artificial sequence
  an artificially synthesized sequence
EAQGDKII

SEQ ID NO: 121 - protein, 8 aa, Artificial sequence
  an artificially synthesized sequence
LAFSDAGP

SEQ ID NO: 122 - protein, 7 aa, Artificial sequence
  an artificially synthesized sequence
YVADAPK

SEQ ID NO: 123 - protein, 5 aa, Artificial sequence
  an artificially synthesized sequence
RRRRR

SEQ ID NO: 124 - protein, 6 aa, Artificial sequence
  an artificially synthesized sequence
RRRRRR

SEQ ID NO: 125 - protein, 10 aa, Artificial sequence
  an artificially synthesized sequence
GQSSRHRRAL

SEQ ID NO: 126 - protein, 9 aa, Artificial sequence
  an artificially synthesized sequence
SSRHRRALD

SEQ ID NO: 127 - protein, 14 aa, Artificial sequence
  an artificially synthesized sequence
RKSSIIIRMRDVVL

SEQ ID NO: 128 - protein, 15 aa, Artificial sequence
  an artificially synthesized sequence
SSSFDKGKYKKGDDA

SEQ ID NO: 129 - protein, 15 aa, Artificial sequence
  an artificially synthesized sequence
SSSFDKGKYKRGDDA

SEQ ID NO: 130 - protein, 4 aa, Artificial sequence
  an artificially synthesized sequence
IEGR

SEQ ID NO: 131 - protein, 4 aa, Artificial sequence
  an artificially synthesized sequence
IDGR

SEQ ID NO: 132 - protein, 7 aa, Artificial sequence
  an artificially synthesized sequence
GGSIDGR

SEQ ID NO: 133 - protein, 8 aa, Artificial sequence
  an artificially synthesized sequence
GPQGIAGQ

SEQ ID NO: 134 - protein, 8 aa, Artificial sequence
  an artificially synthesized sequence
GPQGLLGA

SEQ ID NO: 135 - protein, 5 aa, Artificial sequence
  an artificially synthesized sequence
GIAGQ

SEQ ID NO: 136 - protein, 7 aa, Artificial sequence
  an artificially synthesized sequence
GPLGIAG

SEQ ID NO: 137 - protein, 8 aa, Artificial sequence
  an artificially synthesized sequence
GPEGLRVG

SEQ ID NO: 138 - protein, 8 aa, Artificial sequence
  an artificially synthesized sequence
YGAGLGVV

SEQ ID NO: 139 - protein, 8 aa, Artificial sequence
  an artificially synthesized sequence
AGLGVVER

SEQ ID NO: 140 - protein, 8 aa, Artificial sequence
  an artificially synthesized sequence
AGLGISST

SEQ ID NO: 141 - protein, 8 aa, Artificial sequence
  an artificially synthesized sequence
EPQALAMS

SEQ ID NO: 142 - protein, 8 aa, Artificial sequence
  an artificially synthesized sequence
QALAMSAI

SEQ ID NO: 143 - protein, 8 aa, Artificial sequence
  an artificially synthesized sequence
AAYHLVSQ

SEQ ID NO: 144 - protein, 8 aa, Artificial sequence
  an artificially synthesized sequence
MDAFLESS

SEQ ID NO: 145 - protein, 8 aa, Artificial sequence
  an artificially synthesized sequence
ESLPVVAV

SEQ ID NO: 146 - protein, 8 aa, Artificial sequence
  an artificially synthesized sequence
SAPAVESE

SEQ ID NO: 147 - protein, 8 aa, Artificial sequence
  an artificially synthesized sequence
DVAQFVLT

SEQ ID NO: 148 - protein, 8 aa, Artificial sequence
  an artificially synthesized sequence
VAQFVLTE

SEQ ID NO: 149 - protein, 8 aa, Artificial sequence
  an artificially synthesized sequence
AQFVLTEG

SEQ ID NO: 150 - protein, 8 aa, Artificial sequence
  an artificially synthesized sequence
PVQPIGPQ

SEQ ID NO: 151 - protein, 6 aa, Artificial sequence
  an artificially synthesized sequence
LVPRGS

SEQ ID NO: 152 - protein, 214 aa, Artificial sequence
  an artificially synthesized sequence
DIQMTQSPSSLSASVGDRVTITCRASQSISSYLNWYQQKPGKAPKLLIYAASSLQSGVPSRFSGSGSGTDFTLTISSLQPEDFATYYCLQFDSYPLTFGGGTKVEIKRTVAAPSVFIFPPSDEQLKSGTASVVCLLNNFYPREAKVQWKVDNALQSGNSQESVTEQDSKDSTYSLSSTLTLSKADYEKHKVYACEVTHQGLSSPVTKSFNRGEA

SEQ ID NO: 153 - protein, 107 aa, Artificial sequence
  an artificially synthesized sequence
RTVAAPSVFIFPPSDEQLKSGTASVVCLLNNFYPREAKVQWKVDNALQSGNSQESVTEQDSKDSTYSLSSTLTLSKADYEKHKVYACEVTHQGLSSPVTKSFNRGEA

SEQ ID NO: 154 - protein, 464 aa, Artificial sequence
  an artificially synthesized sequence
QLQLVESGGGLVQPGGSLRLSCTASGISFSISTMGWYRQAPGKQRELVATITSGGEAYYANSMKDRFTISRDNAENTVYLQMNRLKPEDSAVYYCNTKFPWSTDWDSRGQGTQVTVSGGSGLSGRSDNHGSSGGSSASTKGPSVFPLAPSSKSTSGGTAALGCLVKDYFPEPVTVSWNSGALTSGVHTFPAVLQSSGLYSLSSVVTVPSSSLGTQTYICNVNHKPSNTKVDKKVEPKSCDKTHTCPPCPAPELLGGPSVFLFPPKPKDTLMISRTPEVTCVVVDVSHEDPEVKFNWYVDGVEVHNAKTKPREEQYNSTYRVVSVLTVLHQDWLNGKEYKCKVSNKALPAPIEKTISKAKGQPREPQVYTLPPSREEMTKNQVSLTCLVKGFYPSDIAVEWESNGQPENNYKTTPPVLDSDGSFFLYSKLTVDKSRWQQGNVFSCSVMHEALHNHYTQKSLSLSP

SEQ ID NO: 155 - protein, 464 aa, Artificial sequence
  an artificially synthesized sequence
QVQLVESGGGLVQPGGSLRLSCTASGISFSISTMGWYRQAPGKQRELVATITSGGEAYYANSMKDRFTISRDNAENTVYLQMNRLKPEDSAVYYCNTKFPWSTDWDSRGQGTQVTVSGGSGLSGRSDNHGSSGGSSASTKGPSVFPLAPSSKSTSGGTAALGCLVKDYFPEPVTVSWNSGALTSGVHTFPAVLQSSGLYSLSSVVTVPSSSLGTQTYICNVNHKPSNTKVDKKVEPKSCDKTHTCPPCPAPELLGGPSVFLFPPKPKDTLMISRTPEVTCVVVDVSHEDPEVKFNWYVDGVEVHNAKTKPREEQYNSTYRVVSVLTVLHQDWLNGKEYKCKVSNKALPAPIEKTISKAKGQPREPQVYTLPPSREEMTKNQVSLTCLVKGFYPSDIAVEWESNGQPENNYKTTPPVLDSDGSFFLYSKLTVDKSRWQQGNVFSCSVMHEALHNHYTQKSLSLSP

SEQ ID NO: 156 - protein, 464 aa, Artificial sequence
  an artificially synthesized sequence
QVQLVESGGGLVQPGGSLRLSCTASGISFSISTMGWYRQAPGKQRELVATITSGGEAYYANSMKDRFTISRDNAENTVYLQMNRLKPEDSAVYYCNTKFPWSTDWNARGQGTQVTVSGGSGLSGRSDNHGSSGGSSASTKGPSVFPLAPSSKSTSGGTAALGCLVKDYFPEPVTVSWNSGALTSGVHTFPAVLQSSGLYSLSSVVTVPSSSLGTQTYICNVNHKPSNTKVDKKVEPKSCDKTHTCPPCPAPELLGGPSVFLFPPKPKDTLMISRTPEVTCVVVDVSHEDPEVKFNWYVDGVEVHNAKTKPREEQYNSTYRVVSVLTVLHQDWLNGKEYKCKVSNKALPAPIEKTISKAKGQPREPQVYTLPPSREEMTKNQVSLTCLVKGFYPSDIAVEWESNGQPENNYKTTPPVLDSDGSFFLYSKLTVDKSRWQQGNVFSCSVMHEALHNHYTQKSLSLSP

SEQ ID NO: 157 - protein, 464 aa, Artificial sequence
  an artificially synthesized sequence
QLQLVESGGGLVQPGGSLRLSCTASGISFSISTMGWYRQAPGKQRELVATIASGGEAYYANSVKGRFTISRDNAENTVYLQMNRLKPEDSAVYYCNTKFPWSTDWNARGQGTQVTVSGGSGLSGRSDNHGSSGGSSASTKGPSVFPLAPSSKSTSGGTAALGCLVKDYFPEPVTVSWNSGALTSGVHTFPAVLQSSGLYSLSSVVTVPSSSLGTQTYICNVNHKPSNTKVDKKVEPKSCDKTHTCPPCPAPELLGGPSVFLFPPKPKDTLMISRTPEVTCVVVDVSHEDPEVKFNWYVDGVEVHNAKTKPREEQYNSTYRVVSVLTVLHQDWLNGKEYKCKVSNKALPAPIEKTISKAKGQPREPQVYTLPPSREEMTKNQVSLTCLVKGFYPSDIAVEWESNGQPENNYKTTPPVLDSDGSFFLYSKLTVDKSRWQQGNVFSCSVMHEALHNHYTQKSLSLSP

SEQ ID NO: 158 - protein, 464 aa, Artificial sequence
  an artificially synthesized sequence
QLQLVESGGGLVQPGGSLRLSCTASGISFSISTMGWYRQAPGKQRELVATIASGGEAYYANSVKGRFTISREYAENTVFLQMNRLKPEDSAVYYCNTKFPWSTDWNARGQGTQVTVSGGSGLSGRSDNHGSSGGSSASTKGPSVFPLAPSSKSTSGGTAALGCLVKDYFPEPVTVSWNSGALTSGVHTFPAVLQSSGLYSLSSVVTVPSSSLGTQTYICNVNHKPSNTKVDKKVEPKSCDKTHTCPPCPAPELLGGPSVFLFPPKPKDTLMISRTPEVTCVVVDVSHEDPEVKFNWYVDGVEVHNAKTKPREEQYNSTYRVVSVLTVLHQDWLNGKEYKCKVSNKALPAPIEKTISKAKGQPREPQVYTLPPSREEMTKNQVSLTCLVKGFYPSDIAVEWESNGQPENNYKTTPPVLDSDGSFFLYSKLTVDKSRWQQGNVFSCSVMHEALHNHYTQKSLSLSP

SEQ ID NO: 159 - protein, 116 aa, Artificial sequence
  an artificially synthesized sequence
QVQLVQSGGGLVQPGGSLRLSCAASYFDFDSYEMSWVRQAPGKGLEWIGSIYHSGSTYYNPSLKSRVTISRDNSKNTLYLQMNTLRAEDTATYYCARVNMDRFDYWGQGTLVTVSS

SEQ ID NO: 160 - protein, 124 aa, Artificial sequence
  an artificially synthesized sequence
EVQLVESGGGPVQAGGSLRLSCAASGRTYRGYSMGWFRQAPGKEREFVAAIVWSGGNTYYEDSVKGRFTISRDNAKNTMYLQMTSLKPEDSATYYCAAKIRPYIFKIAGQYDYWGQGTLVTVSS

SEQ ID NO: 161 - protein, 354 aa, Artificial sequence
  an artificially synthesized sequence
GSGLSGRSDNHGSSGGSSASTKGPSVFPLAPSSKSTSGGTAALGCLVKDYFPEPVTVSWNSGALTSGVHTFPAVLQSSGLYSLSSVVTVPSSSLGTQTYICNVNHKPSNTKVDKKVEPKSCDKTHTCPPCPAPELRGGPKVFLFPPKPKDTLMISRTPEVTCVVVDVSHEDPEVKFNWYVDGVEVHNAKTKPREEQYASTYRVVSVLTVLHQDWLNGKEYKCKVSNKALPAPIEKTISKAKGQPREPQVYTLPPSRCEMTKNQVSLSCAVKGFYPSDIAVEWESNGQPENNYKTTPPVLDSDGSFFLVSKLTVDKSRWQQGNVFSCSVMHEALHNHYTQKSLSLSPDYKDDDDK

SEQ ID NO: 162 - protein, 629 aa, Artificial sequence
  an artificially synthesized sequence
QVQLVQSGGGLVQPGGSLRLSCAASYFDFDSYEMSWVRQAPGKGLEWIGSIYHSGSTYYNPSLKSRVTISRDNSKNTLYLQMNTLRAEDTATYYCARVNMDRFDYWGQGTLVTVSSGGGGSGGGGSGGGGSGGGGSGGGGSGGGGSGGGGSEVQLVESGGGPVQAGGSLRLSCAASGRTYRGYSMGWFRQAPGKEREFVAAIVWSGGNTYYEDSVKGRFTISRDNAKNTMYLQMTSLKPEDSATYYCAAKIRPYIFKIAGQYDYWGQGTLVTVSSGSGLSGRSDNHGSSGGSSASTKGPSVFPLAPSSKSTSGGTAALGCLVKDYFPEPVTVSWNSGALTSGVHTFPAVLQSSGLYSLSSVVTVPSSSLGTQTYICNVNHKPSNTKVDKKVEPKSCDKTHTCPPCPAPELRGGPKVFLFPPKPKDTLMISRTPEVTCVVVDVSHEDPEVKFNWYVDGVEVHNAKTKPREEQYASTYRVVSVLTVLHQDWLNGKEYKCKVSNKALPAPIEKTISKAKGQPREPQVYTLPPSRCEMTKNQVSLSCAVKGFYPSDIAVEWESNGQPENNYKTTPPVLDSDGSFFLVSKLTVDKSRWQQGNVFSCSVMHEALHNHYTQKSLSLSPDYKDDDDK

SEQ ID NO: 163 - protein, 118 aa, Artificial sequence
  an artificially synthesized sequence
EVQLVESGGGLVQAGGSLRLSCAASGITFSINTMGWYRQAPGKQRELVALISSIGDTYYADSVKGRFTISRDNAKNTVYLQMNSLKPEDTAVYYCKRFRTAAQGTDYWGQGTLVTVSS

SEQ ID NO: 164 - protein, 631 aa, Artificial sequence
  an artificially synthesized sequence
EVQLVESGGGLVQAGGSLRLSCAASGITFSINTMGWYRQAPGKQRELVALISSIGDTYYADSVKGRFTISRDNAKNTVYLQMNSLKPEDTAVYYCKRFRTAAQGTDYWGQGTLVTVSSGGGGSGGGGSGGGGSGGGGSGGGGSGGGGSGGGGSEVQLVESGGGPVQAGGSLRLSCAASGRTYRGYSMGWFRQAPGKEREFVAAIVWSGGNTYYEDSVKGRFTISRDNAKNTMYLQMTSLKPEDSATYYCAAKIRPYIFKIAGQYDYWGQGTLVTVSSGSGLSGRSDNHGSSGGSSASTKGPSVFPLAPSSKSTSGGTAALGCLVKDYFPEPVTVSWNSGALTSGVHTFPAVLQSSGLYSLSSVVTVPSSSLGTQTYICNVNHKPSNTKVDKKVEPKSCDKTHTCPPCPAPELRGGPKVFLFPPKPKDTLMISRTPEVTCVVVDVSHEDPEVKFNWYVDGVEVHNAKTKPREEQYASTYRVVSVLTVLHQDWLNGKEYKCKVSNKALPAPIEKTISKAKGQPREPQVYTLPPSRCEMTKNQVSLSCAVKGFYPSDIAVEWESNGQPENNYKTTPPVLDSDGSFFLVSKLTVDKSRWQQGNVFSCSVMHEALHNHYTQKSLSLSPDYKDDDDK

SEQ ID NO: 165 - protein, 468 aa, Artificial sequence
  an artificially synthesized sequence
EVQLVESGGGLVQPGGSLRLSCAASGFTFDDYGMSWVRQAPGKALEWVSAISWNGNNTYYTESMKGRFTISRDNAKNTLYLQMNSLRPEDTAVYYCVKGSTAIVGVPPTYPDEYDYWGQGTLVTVSSAGAGIPVSLRSGAGSTKGPSVFPLAPSSKSTSGGTAALGCLVKDYFPEPVTVSWNSGALTSGVHTFPAVLQSSGLYSLSSVVTVPSSSLGTQTYICNVNHKPSNTKVDKKVEPKSCDKTHTCPPCPAPELLGGPSVFLFPPKPKDTLMISRTPEVTCVVVDVSHEDPEVKFNWYVDGVEVHNAKTKPREEQYNSTYRVVSVLTVLHQDWLNGKEYKCKVSNKALPAPIEKTISKAKGQPREPQVYTLPPSREEMTKNQVSLTCLVKGFYPSDIAVEWESNGQPENNYKTTPPVLDSDGSFFLYSKLTVDKSRWQQGNVFSCSVMHEALHNHYTQKSLSLSP

SEQ ID NO: 166 - protein, 230 aa, Artificial sequence
  an artificially synthesized sequence
EPKSSDKTHTCPPCPAPELLGGPSVFLFPPKPKDTLMISRTPEVTCVVVDVSHEDPEVKFNWYVDGVEVHNAKTKPREEQYNSTYRVVSVLTVLHQDWLNGKEYKCKVSNKALPAPIEKTISKAKGQPREPQVCTLPPSRDELTKNQVSLWCLVKGFYPSDIAVEWESNGQPENNYKTTPPVLDSDGSFFLYSKLTVDKSRWQQGNVFSCSVMHEALHNHYTQKSLSLSP

SEQ ID NO: 167 - protein, 455 aa, Artificial sequence
  an artificially synthesized sequence
EVQLVESGGGLVQPGGSLRLSCAASGFTFDDYGMSWVRQAPGKALEWVSAISWNGNNTYYTESMKGRFTISRDNAKNTLYLQMNSLRPEDTAVYYCVKGSTAIVGVPPTYPDEYDYWGQGTLVTVSSASTKGPSVFPLAPSSKSTSGGTAALGCLVKDYFPEPVTVSWNSGALTSGVHTFPAVLQSSGLYSLSSVVTVPSSSLGTQTYICNVNHKPSNTKVDKRVEPKSCDKTHTCPPCPAPELRRGPSVFLFPPKPKDTLMISRTPEVTCVVVDVSHEDPEVKFNWYVDGVEVHNAKTKPREEQYNSTYRVVSVLTVLHQDWLNGKEYKCKVSNKGLPSSIEKTISKAKGQPREPQVYTLPPSREEMTKNQVSLTCLVKGFYPSDIAVEWESNGQPENNYKTTPPVLDSDGSFFLYSKLTVDKSRWQEGNVFSCSVMHEALHNHYTQKSLSLSP

SEQ ID NO: 168 - protein, 12 aa, Artificial sequence
  an artificially synthesized sequence
TSGSGRSANARG

SEQ ID NO: 169 - protein, 12 aa, Artificial sequence
  an artificially synthesized sequence
TSQSGRSANQRG

SEQ ID NO: 170 - protein, 12 aa, Artificial sequence
  an artificially synthesized sequence
TSPSGRSAYPRG

SEQ ID NO: 171 - protein, 12 aa, Artificial sequence
  an artificially synthesized sequence
TSGSGRSATPRG

SEQ ID NO: 172 - protein, 12 aa, Artificial sequence
  an artificially synthesized sequence
TSQSGRSATPRG

SEQ ID NO: 173 - protein, 12 aa, Artificial sequence
  an artificially synthesized sequence
TSASGRSATPRG

SEQ ID NO: 174 - protein, 12 aa, Artificial sequence
  an artificially synthesized sequence
TSYSGRSAVPRG

SEQ ID NO: 175 - protein, 12 aa, Artificial sequence
  an artificially synthesized sequence
TSYSGRSANFRG

SEQ ID NO: 176 - protein, 12 aa, Artificial sequence
  an artificially synthesized sequence
TSSSGRSATPRG

SEQ ID NO: 177 - protein, 12 aa, Artificial sequence
  an artificially synthesized sequence
TSTTGRSASPRG

SEQ ID NO: 178 - protein, 12 aa, Artificial sequence
  an artificially synthesized sequence
TSTSGRSANPRG

SEQ ID NO: 179 - protein, 467 aa, Artificial sequence
  an artificially synthesized sequence
EVQLVESGGGLVQPGGSLRLSCAASGFTFDDYGMSWVRQAPGKALEWVSAISWNGNNTYYTESMKGRFTISRDNAKNTLYLQMNSLRPEDTAVYYCVKGSTAIVGVPPTYPDEYDYWGQGTLVTVSSTSGSGRSANARGASTKGPSVFPLAPSSKSTSGGTAALGCLVKDYFPEPVTVSWNSGALTSGVHTFPAVLQSSGLYSLSSVVTVPSSSLGTQTYICNVNHKPSNTKVDKRVEPKSCDKTHTCPPCPAPELRRGPSVFLFPPKPKDTLMISRTPEVTCVVVDVSHEDPEVKFNWYVDGVEVHNAKTKPREEQYNSTYRVVSVLTVLHQDWLNGKEYKCKVSNKGLPSSIEKTISKAKGQPREPQVYTLPPSREEMTKNQVSLTCLVKGFYPSDIAVEWESNGQPENNYKTTPPVLDSDGSFFLYSKLTVDKSRWQEGNVFSCSVMHEALHNHYTQKSLSLSP

SEQ ID NO: 180 - protein, 467 aa, Artificial sequence
  an artificially synthesized sequence
EVQLVESGGGLVQPGGSLRLSCAASGFTFDDYGMSWVRQAPGKALEWVSAISWNGNNTYYTESMKGRFTISRDNAKNTLYLQMNSLRPEDTAVYYCVKGSTAIVGVPPTYPDEYDYWGQGTLVTVSSTSQSGRSANQRGASTKGPSVFPLAPSSKSTSGGTAALGCLVKDYFPEPVTVSWNSGALTSGVHTFPAVLQSSGLYSLSSVVTVPSSSLGTQTYICNVNHKPSNTKVDKRVEPKSCDKTHTCPPCPAPELRRGPSVFLFPPKPKDTLMISRTPEVTCVVVDVSHEDPEVKFNWYVDGVEVHNAKTKPREEQYNSTYRVVSVLTVLHQDWLNGKEYKCKVSNKGLPSSIEKTISKAKGQPREPQVYTLPPSREEMTKNQVSLTCLVKGFYPSDIAVEWESNGQPENNYKTTPPVLDSDGSFFLYSKLTVDKSRWQEGNVFSCSVMHEALHNHYTQKSLSLSP

SEQ ID NO: 181 - protein, 467 aa, Artificial sequence
  an artificially synthesized sequence
EVQLVESGGGLVQPGGSLRLSCAASGFTFDDYGMSWVRQAPGKALEWVSAISWNGNNTYYTESMKGRFTISRDNAKNTLYLQMNSLRPEDTAVYYCVKGSTAIVGVPPTYPDEYDYWGQGTLVTVSSTSPSGRSAYPRGASTKGPSVFPLAPSSKSTSGGTAALGCLVKDYFPEPVTVSWNSGALTSGVHTFPAVLQSSGLYSLSSVVTVPSSSLGTQTYICNVNHKPSNTKVDKRVEPKSCDKTHTCPPCPAPELRRGPSVFLFPPKPKDTLMISRTPEVTCVVVDVSHEDPEVKFNWYVDGVEVHNAKTKPREEQYNSTYRVVSVLTVLHQDWLNGKEYKCKVSNKGLPSSIEKTISKAKGQPREPQVYTLPPSREEMTKNQVSLTCLVKGFYPSDIAVEWESNGQPENNYKTTPPVLDSDGSFFLYSKLTVDKSRWQEGNVFSCSVMHEALHNHYTQKSLSLSP

SEQ ID NO: 182 - protein, 467 aa, Artificial sequence
  an artificially synthesized sequence
EVQLVESGGGLVQPGGSLRLSCAASGFTFDDYGMSWVRQAPGKALEWVSAISWNGNNTYYTESMKGRFTISRDNAKNTLYLQMNSLRPEDTAVYYCVKGSTAIVGVPPTYPDEYDYWGQGTLVTVSSTSGSGRSATPRGASTKGPSVFPLAPSSKSTSGGTAALGCLVKDYFPEPVTVSWNSGALTSGVHTFPAVLQSSGLYSLSSVVTVPSSSLGTQTYICNVNHKPSNTKVDKRVEPKSCDKTHTCPPCPAPELRRGPSVFLFPPKPKDTLMISRTPEVTCVVVDVSHEDPEVKFNWYVDGVEVHNAKTKPREEQYNSTYRVVSVLTVLHQDWLNGKEYKCKVSNKGLPSSIEKTISKAKGQPREPQVYTLPPSREEMTKNQVSLTCLVKGFYPSDIAVEWESNGQPENNYKTTPPVLDSDGSFFLYSKLTVDKSRWQEGNVFSCSVMHEALHNHYTQKSLSLSP

SEQ ID NO: 183 - protein, 467 aa, Artificial sequence
  an artificially synthesized sequence
EVQLVESGGGLVQPGGSLRLSCAASGFTFDDYGMSWVRQAPGKALEWVSAISWNGNNTYYTESMKGRFTISRDNAKNTLYLQMNSLRPEDTAVYYCVKGSTAIVGVPPTYPDEYDYWGQGTLVTVSSTSQSGRSATPRGASTKGPSVFPLAPSSKSTSGGTAALGCLVKDYFPEPVTVSWNSGALTSGVHTFPAVLQSSGLYSLSSVVTVPSSSLGTQTYICNVNHKPSNTKVDKRVEPKSCDKTHTCPPCPAPELRRGPSVFLFPPKPKDTLMISRTPEVTCVVVDVSHEDPEVKFNWYVDGVEVHNAKTKPREEQYNSTYRVVSVLTVLHQDWLNGKEYKCKVSNKGLPSSIEKTISKAKGQPREPQVYTLPPSREEMTKNQVSLTCLVKGFYPSDIAVEWESNGQPENNYKTTPPVLDSDGSFFLYSKLTVDKSRWQEGNVFSCSVMHEALHNHYTQKSLSLSP

SEQ ID NO: 184 - protein, 467 aa, Artificial sequence
  an artificially synthesized sequence
EVQLVESGGGLVQPGGSLRLSCAASGFTFDDYGMSWVRQAPGKALEWVSAISWNGNNTYYTESMKGRFTISRDNAKNTLYLQMNSLRPEDTAVYYCVKGSTAIVGVPPTYPDEYDYWGQGTLVTVSSTSASGRSATPRGASTKGPSVFPLAPSSKSTSGGTAALGCLVKDYFPEPVTVSWNSGALTSGVHTFPAVLQSSGLYSLSSVVTVPSSSLGTQTYICNVNHKPSNTKVDKRVEPKSCDKTHTCPPCPAPELRRGPSVFLFPPKPKDTLMISRTPEVTCVVVDVSHEDPEVKFNWYVDGVEVHNAKTKPREEQYNSTYRVVSVLTVLHQDWLNGKEYKCKVSNKGLPSSIEKTISKAKGQPREPQVYTLPPSREEMTKNQVSLTCLVKGFYPSDIAVEWESNGQPENNYKTTPPVLDSDGSFFLYSKLTVDKSRWQEGNVFSCSVMHEALHNHYTQKSLSLSP

SEQ ID NO: 185 - protein, 467 aa, Artificial sequence
  an artificially synthesized sequence
EVQLVESGGGLVQPGGSLRLSCAASGFTFDDYGMSWVRQAPGKALEWVSAISWNGNNTYYTESMKGRFTISRDNAKNTLYLQMNSLRPEDTAVYYCVKGSTAIVGVPPTYPDEYDYWGQGTLVTVSSTSYSGRSAVPRGASTKGPSVFPLAPSSKSTSGGTAALGCLVKDYFPEPVTVSWNSGALTSGVHTFPAVLQSSGLYSLSSVVTVPSSSLGTQTYICNVNHKPSNTKVDKRVEPKSCDKTHTCPPCPAPELRRGPSVFLFPPKPKDTLMISRTPEVTCVVVDVSHEDPEVKFNWYVDGVEVHNAKTKPREEQYNSTYRVVSVLTVLHQDWLNGKEYKCKVSNKGLPSSIEKTISKAKGQPREPQVYTLPPSREEMTKNQVSLTCLVKGFYPSDIAVEWESNGQPENNYKTTPPVLDSDGSFFLYSKLTVDKSRWQEGNVFSCSVMHEALHNHYTQKSLSLSP

SEQ ID NO: 186 - protein, 467 aa, Artificial sequence
  an artificially synthesized sequence
EVQLVESGGGLVQPGGSLRLSCAASGFTFDDYGMSWVRQAPGKALEWVSAISWNGNNTYYTESMKGRFTISRDNAKNTLYLQMNSLRPEDTAVYYCVKGSTAIVGVPPTYPDEYDYWGQGTLVTVSSTSYSGRSANFRGASTKGPSVFPLAPSSKSTSGGTAALGCLVKDYFPEPVTVSWNSGALTSGVHTFPAVLQSSGLYSLSSVVTVPSSSLGTQTYICNVNHKPSNTKVDKRVEPKSCDKTHTCPPCPAPELRRGPSVFLFPPKPKDTLMISRTPEVTCVVVDVSHEDPEVKFNWYVDGVEVHNAKTKPREEQYNSTYRVVSVLTVLHQDWLNGKEYKCKVSNKGLPSSIEKTISKAKGQPREPQVYTLPPSREEMTKNQVSLTCLVKGFYPSDIAVEWESNGQPENNYKTTPPVLDSDGSFFLYSKLTVDKSRWQEGNVFSCSVMHEALHNHYTQKSLSLSP

SEQ ID NO: 187 - protein, 467 aa, Artificial sequence
  an artificially synthesized sequence
EVQLVESGGGLVQPGGSLRLSCAASGFTFDDYGMSWVRQAPGKALEWVSAISWNGNNTYYTESMKGRFTISRDNAKNTLYLQMNSLRPEDTAVYYCVKGSTAIVGVPPTYPDEYDYWGQGTLVTVSSTSSSGRSATPRGASTKGPSVFPLAPSSKSTSGGTAALGCLVKDYFPEPVTVSWNSGALTSGVHTFPAVLQSSGLYSLSSVVTVPSSSLGTQTYICNVNHKPSNTKVDKRVEPKSCDKTHTCPPCPAPELRRGPSVFLFPPKPKDTLMISRTPEVTCVVVDVSHEDPEVKFNWYVDGVEVHNAKTKPREEQYNSTYRVVSVLTVLHQDWLNGKEYKCKVSNKGLPSSIEKTISKAKGQPREPQVYTLPPSREEMTKNQVSLTCLVKGFYPSDIAVEWESNGQPENNYKTTPPVLDSDGSFFLYSKLTVDKSRWQEGNVFSCSVMHEALHNHYTQKSLSLSP

SEQ ID NO: 188 - protein, 467 aa, Artificial sequence
  an artificially synthesized sequence
EVQLVESGGGLVQPGGSLRLSCAASGFTFDDYGMSWVRQAPGKALEWVSAISWNGNNTYYTESMKGRFTISRDNAKNTLYLQMNSLRPEDTAVYYCVKGSTAIVGVPPTYPDEYDYWGQGTLVTVSSTSTTGRSASPRGASTKGPSVFPLAPSSKSTSGGTAALGCLVKDYFPEPVTVSWNSGALTSGVHTFPAVLQSSGLYSLSSVVTVPSSSLGTQTYICNVNHKPSNTKVDKRVEPKSCDKTHTCPPCPAPELRRGPSVFLFPPKPKDTLMISRTPEVTCVVVDVSHEDPEVKFNWYVDGVEVHNAKTKPREEQYNSTYRVVSVLTVLHQDWLNGKEYKCKVSNKGLPSSIEKTISKAKGQPREPQVYTLPPSREEMTKNQVSLTCLVKGFYPSDIAVEWESNGQPENNYKTTPPVLDSDGSFFLYSKLTVDKSRWQEGNVFSCSVMHEALHNHYTQKSLSLSP

SEQ ID NO: 189 - protein, 467 aa, Artificial sequence
  an artificially synthesized sequence
EVQLVESGGGLVQPGGSLRLSCAASGFTFDDYGMSWVRQAPGKALEWVSAISWNGNNTYYTESMKGRFTISRDNAKNTLYLQMNSLRPEDTAVYYCVKGSTAIVGVPPTYPDEYDYWGQGTLVTVSSTSTSGRSANPRGASTKGPSVFPLAPSSKSTSGGTAALGCLVKDYFPEPVTVSWNSGALTSGVHTFPAVLQSSGLYSLSSVVTVPSSSLGTQTYICNVNHKPSNTKVDKRVEPKSCDKTHTCPPCPAPELRRGPSVFLFPPKPKDTLMISRTPEVTCVVVDVSHEDPEVKFNWYVDGVEVHNAKTKPREEQYNSTYRVVSVLTVLHQDWLNGKEYKCKVSNKGLPSSIEKTISKAKGQPREPQVYTLPPSREEMTKNQVSLTCLVKGFYPSDIAVEWESNGQPENNYKTTPPVLDSDGSFFLYSKLTVDKSRWQEGNVFSCSVMHEALHNHYTQKSLSLSP

SEQ ID NO: 190 - protein, 127 aa, Artificial sequence
  an artificially synthesized sequence
EVQLVESGGGLVQPGGSLRLSCAASGFTFSDYDIGWFRQAPGKGREGVSGISSSDGNTYYADSVKGRFTISRDNAKNTLYLQMNSLRPEDTAVYYCAAEPPDSSWYLDGSPEFFKYWGQGTLVTVSS

SEQ ID NO: 191 - protein, 455 aa, Artificial sequence
  an artificially synthesized sequence
EVQLVESGGGLVQPGGSLRLSCAASGFTFSDYDIGWFRQAPGKGREGVSGISSSDGNTYYADSVKGRFTISRDNAKNTLYLQMNSLRPEDTAVYYCAAEPPDSSWYLDGSPEFFKYWGQGTLVTVSSASTKGPSVFPLAPSSKSTSGGTAALGCLVKDYFPEPVTVSWNSGALTSGVHTFPAVLQSSGLYSLSSVVTVPSSSLGTQTYICNVNHKPSNTKVDKKVEPKSCDKTHTCPPCPAPELLGGPSVFLFPPKPKDTLMISRTPEVTCVVVDVSHEDPEVKFNWYVDGVEVHNAKTKPREEQYNSTYRVVSVLTVLHQDWLNGKEYKCKVSNKALPAPIEKTISKAKGQPREPQVYTLPPSREEMTKNQVSLTCLVKGFYPSDIAVEWESNGQPENNYKTTPPVLDSDGSFFLYSKLTVDKSRWQQGNVFSCSVMHEALHNHYTQKSLSLSP

SEQ ID NO: 192 - protein, 455 aa, Artificial sequence
  an artificially synthesized sequence
EVQLVESGGGLVQPGGSLRLSCAASGFTFSDYDIGWVRQAPGKGLEWVSGISSSDGNTYYADSVKGRFTISRDNAKNTLYLQMNSLRPEDTAVYYCAAEPPDSSWYLDGSPEFFKYWGQGTLVTVSSASTKGPSVFPLAPSSKSTSGGTAALGCLVKDYFPEPVTVSWNSGALTSGVHTFPAVLQSSGLYSLSSVVTVPSSSLGTQTYICNVNHKPSNTKVDKKVEPKSCDKTHTCPPCPAPELLGGPSVFLFPPKPKDTLMISRTPEVTCVVVDVSHEDPEVKFNWYVDGVEVHNAKTKPREEQYNSTYRVVSVLTVLHQDWLNGKEYKCKVSNKALPAPIEKTISKAKGQPREPQVYTLPPSREEMTKNQVSLTCLVKGFYPSDIAVEWESNGQPENNYKTTPPVLDSDGSFFLYSKLTVDKSRWQQGNVFSCSVMHEALHNHYTQKSLSLSP

SEQ ID NO: 193 - protein, 16 aa, Artificial sequence
  an artificially synthesized sequence
GGGGSPLGLAGGGGGS

SEQ ID NO: 194 - protein, 18 aa, Artificial sequence
  an artificially synthesized sequence
GGGGSGPLGIAGQGGGGS

SEQ ID NO: 195 - protein, 23 aa, Artificial sequence
  an artificially synthesized sequence
GGGGSGAGVPLSLYSGAGGGGGS

SEQ ID NO: 196 - protein, 471 aa, Artificial sequence
  an artificially synthesized sequence
EVQLVESGGGLVQPGGSLRLSCAASGFTFDDYGMSWVRQAPGKALEWVSAISWNGNNTYYTESMKGRFTISRDNAKNTLYLQMNSLRPEDTAVYYCVKGSTAIVGVPPTYPDEYDYWGQGTLVTVSSAGGGGSPLGLAGGGGGSSTKGPSVFPLAPSSKSTSGGTAALGCLVKDYFPEPVTVSWNSGALTSGVHTFPAVLQSSGLYSLSSVVTVPSSSLGTQTYICNVNHKPSNTKVDKKVEPKSCDKTHTCPPCPAPELLGGPSVFLFPPKPKDTLMISRTPEVTCVVVDVSHEDPEVKFNWYVDGVEVHNAKTKPREEQYNSTYRVVSVLTVLHQDWLNGKEYKCKVSNKALPAPIEKTISKAKGQPREPQVYTLPPSREEMTKNQVSLTCLVKGFYPSDIAVEWESNGQPENNYKTTPPVLDSDGSFFLYSKLTVDKSRWQQGNVFSCSVMHEALHNHYTQKSLSLSP

SEQ ID NO: 197 - protein, 473 aa, Artificial sequence
  an artificially synthesized sequence
EVQLVESGGGLVQPGGSLRLSCAASGFTFDDYGMSWVRQAPGKALEWVSAISWNGNNTYYTESMKGRFTISRDNAKNTLYLQMNSLRPEDTAVYYCVKGSTAIVGVPPTYPDEYDYWGQGTLVTVSSAGGGGSGPLGIAGQGGGGSSTKGPSVFPLAPSSKSTSGGTAALGCLVKDYFPEPVTVSWNSGALTSGVHTFPAVLQSSGLYSLSSVVTVPSSSLGTQTYICNVNHKPSNTKVDKRVEPKSCDKTHTCPPCPAPELRRGPSVFLFPPKPKDTLMISRTPEVTCVVVDVSHEDPEVKFNWYVDGVEVHNAKTKPREEQYNSTYRVVSVLTVLHQDWLNGKEYKCKVSNKGLPSSIEKTISKAKGQPREPQVYTLPPSREEMTKNQVSLTCLVKGFYPSDIAVEWESNGQPENNYKTTPPVLDSDGSFFLYSKLTVDKSRWQEGNVFSCSVMHEALHNHYTQKSLSLSP

SEQ ID NO: 198 - protein, 478 aa, Artificial sequence
  an artificially synthesized sequence
EVQLVESGGGLVQPGGSLRLSCAASGFTFDDYGMSWVRQAPGKALEWVSAISWNGNNTYYTESMKGRFTISRDNAKNTLYLQMNSLRPEDTAVYYCVKGSTAIVGVPPTYPDEYDYWGQGTLVTVSSAGGGGSGAGVPLSLYSGAGGGGGSSTKGPSVFPLAPSSKSTSGGTAALGCLVKDYFPEPVTVSWNSGALTSGVHTFPAVLQSSGLYSLSSVVTVPSSSLGTQTYICNVNHKPSNTKVDKKVEPKSCDKTHTCPPCPAPELLGGPSVFLFPPKPKDTLMISRTPEVTCVVVDVSHEDPEVKFNWYVDGVEVHNAKTKPREEQYNSTYRVVSVLTVLHQDWLNGKEYKCKVSNKALPAPIEKTISKAKGQPREPQVYTLPPSREEMTKNQVSLTCLVKGFYPSDIAVEWESNGQPENNYKTTPPVLDSDGSFFLYSKLTVDKSRWQQGNVFSCSVMHEALHNHYTQKSLSLSP

SEQ ID NO: 199 - protein, 8 aa, Artificial sequence
  an artificially synthesized sequence
DYKDDDDK

SEQ ID NO: 200 - protein, 1267 aa, Artificial sequence
  an artificially synthesized sequence
MWWRLWWLLLLLLLLWPMVWAEAGLPRAGGGSQPPFRTFSASDWGLTHLVVHEQTGEVYVGAVNRIYKLSGNLTLLRAHVTGPVEDNEKCYPPPSVQSCPHGLGSTDNVNKLLLLDYAANRLLACGSASQGICQFLRLDDLFKLGEPHHRKEHYLSSVQEAGSMAGVLIAGPPGQGQAKLFVGTPIDGKSEYFPTLSSRRLMANEEDADMFGFVYQDEFVSSQLKIPSDTLSKFPAFDIYYVYSFRSEQFVYYLTLQLDTQLTSPDAAGEHFFTSKIVRLCVDDPKFYSYVEFPIGCEQAGVEYRLVQDAYLSRPGRALAHQLGLAEDEDVLFTVFAQGQKNRVKPPKESALCLFTLRAIKEKIKERIQSCYRGEGKLSLPWLLNKELGCINSPLQIDDDFCGQDFNQPLGGTVTIEGTPLFVDKDDGLTAVAAYDYRGRTVVFAGTRSGRIRKILVDLSNPGGRPALAYESVVAQEGSPILRDLVLSPNHQYLYAMTEKQVTRVPVESCVQYTSCELCLGSRDPHCGWCVLHSICSRRDACERADEPQRFAADLLQCVQLTVQPRNVSVTMSQVPLVLQAWNVPDLSAGVNCSFEDFTESESVLEDGRIHCRSPSAREVAPITRGQGDQRVVKLYLKSKETGKKFASVDFVFYNCSVHQSCLSCVNGSFPCHWCKYRHVCTHNVADCAFLEGRVNVSEDCPQILPSTQIYVPVGVVKPITLAARNLPQPQSGQRGYECLFHIPGSPARVTALRFNSSSLQCQNSSYSYEGNDVSDLPVNLSVVWNGNFVIDNPQNIQAHLYKCPALRESCGLCLKADPRFECGWCVAERRCSLRHHCAADTPASWMHARHGSSRCTDPKILKLSPETGPRQGGTRLTITGENLGLRFEDVRLGVRVGKVLCSPVESEYISAEQIVCEIGDASSVRAHDALVEVCVRDCSPHYRALSPKRFTFVTPTFYRVSPSRGPLSGGTWIGIEGSHLNAGSDVAVSVGGRPCSFSWRNSREIRCLTPPGQSPGSAPIIININRAQLTNPEVKYNYTEDPTILRIDPEWSINSGGTLLTVTGTNLATVREPRIRAKYGGIERENGCLVYNDTTMVCRAPSVANPVRSPPELGERPDELGFVMDNVRSLLVLNSTSFLYYPDPVLEPLSPTGLLELKPSSPLILKGRNLLPPAPGNSRLNYTVLIGSTPCTLTVSETQLLCEAPNLTGQHKVTVRAGGFEFSPGTLQVYSDSLLTLPDYKDDDDKGGGGSGLNDIFEAQKIEWHE

SEQ ID NO: 201 - protein, 347 aa, Artificial sequence
  an artificially synthesized sequence
MVLASSTTSIHTMLLLLLMLAQPAMAMKDNTVPLKLIALLANGEFHSGEQLGETLGMSRAAINKHIQTLRDWGVDVFTVPGKGYSLPEPIQLLNAKQILGQLDGGSVAVLPVIDSTNQYLLDRIGELKSGDACIAEYQQAGRGRRGRKWFSPFGANLYLSMFWRLEQGPAAAIGLSLVIGIVMAEVLRKLGADKVRVKWPNDLYLQDRKLAGILVELTGKTGDAAQIVIGAGINMAMRRVEESVVNQGWITLQEAGINLDRNTLAAMLIRELRAALELFEQEGLAPYLSRWEKLDNFINRPVKLIIGDKEIFGISRGIDKQGALLLEQDGIIKPWMGGEISLRSAEK

SEQ ID NO: 202 - protein, 463 aa, Artificial sequence
  an artificially synthesized sequence
EVQLVESGGGLVQPGGSLRLSCAASGFTFDDYGMSWVRQAPGKALEWVSAISWNGNNTYYTESMKGRFTISRDNAKNTLYLQMNSLRPEDTAVYYCVKGSTAIVGVPPTYPDEYDYWGQGTLVTVSSAGPLGIAGQSTKGPSVFPLAPSSKSTSGGTAALGCLVKDYFPEPVTVSWNSGALTSGVHTFPAVLQSSGLYSLSSVVTVPSSSLGTQTYICNVNHKPSNTKVDKKVEPKSCDKTHTCPPCPAPELLGGPSVFLFPPKPKDTLMISRTPEVTCVVVDVSHEDPEVKFNWYVDGVEVHNAKTKPREEQYNSTYRVVSVLTVLHQDWLNGKEYKCKVSNKALPAPIEKTISKAKGQPREPQVYTLPPSREEMTKNQVSLTCLVKGFYPSDIAVEWESNGQPENNYKTTPPVLDSDGSFFLYSKLTVDKSRWQQGNVFSCSVMHEALHNHYTQKSLSLSP

SEQ ID NO: 203 - protein, 465 aa, Artificial sequence
  an artificially synthesized sequence
EVQLVESGGGLVQPGGSLRLSCAASGFTFDDYGMSWVRQAPGKALEWVSAISWNGNNTYYTESMKGRFTISRDNAKNTLYLQMNSLRPEDTAVYYCVKGSTAIVGVPPTYPDEYDYWGQGTLVTVSSAGGPLGMLSQSSTKGPSVFPLAPSSKSTSGGTAALGCLVKDYFPEPVTVSWNSGALTSGVHTFPAVLQSSGLYSLSSVVTVPSSSLGTQTYICNVNHKPSNTKVDKKVEPKSCDKTHTCPPCPAPELLGGPSVFLFPPKPKDTLMISRTPEVTCVVVDVSHEDPEVKFNWYVDGVEVHNAKTKPREEQYNSTYRVVSVLTVLHQDWLNGKEYKCKVSNKALPAPIEKTISKAKGQPREPQVYTLPPSREEMTKNQVSLTCLVKGFYPSDIAVEWESNGQPENNYKTTPPVLDSDGSFFLYSKLTVDKSRWQQGNVFSCSVMHEALHNHYTQKSLSLSP

SEQ ID NO: 204 - protein, 461 aa, Artificial sequence
  an artificially synthesized sequence
EVQLVESGGGLVQPGGSLRLSCAASGFTFDDYGMSWVRQAPGKALEWVSAISWNGNNTYYTESMKGRFTISRDNAKNTLYLQMNSLRPEDTAVYYCVKGSTAIVGVPPTYPDEYDYWGQGTLVTVSSAPLGLWASTKGPSVFPLAPSSKSTSGGTAALGCLVKDYFPEPVTVSWNSGALTSGVHTFPAVLQSSGLYSLSSVVTVPSSSLGTQTYICNVNHKPSNTKVDKKVEPKSCDKTHTCPPCPAPELLGGPSVFLFPPKPKDTLMISRTPEVTCVVVDVSHEDPEVKFNWYVDGVEVHNAKTKPREEQYNSTYRVVSVLTVLHQDWLNGKEYKCKVSNKALPAPIEKTISKAKGQPREPQVYTLPPSREEMTKNQVSLTCLVKGFYPSDIAVEWESNGQPENNYKTTPPVLDSDGSFFLYSKLTVDKSRWQQGNVFSCSVMHEALHNHYTQKSLSLSP

SEQ ID NO: 205 - protein, 463 aa, Artificial sequence
  an artificially synthesized sequence
EVQLVESGGGLVQPGGSLRLSCAASGFTFDDYGMSWVRQAPGKALEWVSAISWNGNNTYYTESMKGRFTISRDNAKNTLYLQMNSLRPEDTAVYYCVKGSTAIVGVPPTYPDEYDYWGQGTLVTVSSAVPLSLTMGSTKGPSVFPLAPSSKSTSGGTAALGCLVKDYFPEPVTVSWNSGALTSGVHTFPAVLQSSGLYSLSSVVTVPSSSLGTQTYICNVNHKPSNTKVDKKVEPKSCDKTHTCPPCPAPELLGGPSVFLFPPKPKDTLMISRTPEVTCVVVDVSHEDPEVKFNWYVDGVEVHNAKTKPREEQYNSTYRVVSVLTVLHQDWLNGKEYKCKVSNKALPAPIEKTISKAKGQPREPQVYTLPPSREEMTKNQVSLTCLVKGFYPSDIAVEWESNGQPENNYKTTPPVLDSDGSFFLYSKLTVDKSRWQQGNVFSCSVMHEALHNHYTQKSLSLSP

SEQ ID NO: 206 - protein, 468 aa, Artificial sequence
  an artificially synthesized sequence
EVQLVESGGGLVQPGGSLRLSCAASGFTFDDYGMSWVRQAPGKALEWVSAISWNGNNTYYTESMKGRFTISRDNAKNTLYLQMNSLRPEDTAVYYCVKGSTAIVGVPPTYPDEYDYWGQGTLVTVSSAGAGVPLSLTMGAGSTKGPSVFPLAPSSKSTSGGTAALGCLVKDYFPEPVTVSWNSGALTSGVHTFPAVLQSSGLYSLSSVVTVPSSSLGTQTYICNVNHKPSNTKVDKKVEPKSCDKTHTCPPCPAPELLGGPSVFLFPPKPKDTLMISRTPEVTCVVVDVSHEDPEVKFNWYVDGVEVHNAKTKPREEQYNSTYRVVSVLTVLHQDWLNGKEYKCKVSNKALPAPIEKTISKAKGQPREPQVYTLPPSREEMTKNQVSLTCLVKGFYPSDIAVEWESNGQPENNYKTTPPVLDSDGSFFLYSKLTVDKSRWQQGNVFSCSVMHEALHNHYTQKSLSLSP

SEQ ID NO: 207 - protein, 471 aa, Artificial sequence
  an artificially synthesized sequence
EVQLVESGGGLVQPGGSLRLSCAASGFTFDDYGMSWVRQAPGKALEWVSAISWNGNNTYYTESMKGRFTISRDNAKNTLYLQMNSLRPEDTAVYYCVKGSTAIVGVPPTYPDEYDYWGQGTLVTVSSAGAGPQGLAGQRGIVAGSTKGPSVFPLAPSSKSTSGGTAALGCLVKDYFPEPVTVSWNSGALTSGVHTFPAVLQSSGLYSLSSVVTVPSSSLGTQTYICNVNHKPSNTKVDKKVEPKSCDKTHTCPPCPAPELLGGPSVFLFPPKPKDTLMISRTPEVTCVVVDVSHEDPEVKFNWYVDGVEVHNAKTKPREEQYNSTYRVVSVLTVLHQDWLNGKEYKCKVSNKALPAPIEKTISKAKGQPREPQVYTLPPSREEMTKNQVSLTCLVKGFYPSDIAVEWESNGQPENNYKTTPPVLDSDGSFFLYSKLTVDKSRWQQGNVFSCSVMHEALHNHYTQKSLSLSP

SEQ ID NO: 208 - protein, 12 aa, Artificial sequence
  an artificially synthesized sequence
TSASGRSANPRG

SEQ ID NO: 209 - protein, 12 aa, Artificial sequence
  an artificially synthesized sequence
TSESGRSANPRG

SEQ ID NO: 210 - protein, 12 aa, Artificial sequence
  an artificially synthesized sequence
TSFSGRSANPRG

SEQ ID NO: 211 - protein, 12 aa, Artificial sequence
  an artificially synthesized sequence
TSGSGRSANPRG

SEQ ID NO: 212 - protein, 12 aa, Artificial sequence
  an artificially synthesized sequence
TSHSGRSANPRG

SEQ ID NO: 213 - protein, 12 aa, Artificial sequence
  an artificially synthesized sequence
TSKSGRSANPRG

SEQ ID NO: 214 - protein, 12 aa, Artificial sequence
  an artificially synthesized sequence
TSMSGRSANPRG

SEQ ID NO: 215 - protein, 12 aa, Artificial sequence
  an artificially synthesized sequence
TSNSGRSANPRG

SEQ ID NO: 216 - protein, 12 aa, Artificial sequence
  an artificially synthesized sequence
TSPSGRSANPRG

SEQ ID NO: 217 - protein, 12 aa, Artificial sequence
  an artificially synthesized sequence
TSQSGRSANPRG

SEQ ID NO: 218 - protein, 12 aa, Artificial sequence
  an artificially synthesized sequence
TSWSGRSANPRG

SEQ ID NO: 219 - protein, 12 aa, Artificial sequence
  an artificially synthesized sequence
TSYSGRSANPRG

SEQ ID NO: 220 - protein, 12 aa, Artificial sequence
  an artificially synthesized sequence
TSTAGRSANPRG

SEQ ID NO: 221 - protein, 12 aa, Artificial sequence
  an artificially synthesized sequence
TSTDGRSANPRG

SEQ ID NO: 222 - protein, 12 aa, Artificial sequence
  an artificially synthesized sequence
TSTEGRSANPRG

SEQ ID NO: 223 - protein, 12 aa, Artificial sequence
  an artificially synthesized sequence
TSTFGRSANPRG

SEQ ID NO: 224 - protein, 12 aa, Artificial sequence
  an artificially synthesized sequence
TSTLGRSANPRG

SEQ ID NO: 225 - protein, 12 aa, Artificial sequence
  an artificially synthesized sequence
TSTMGRSANPRG

SEQ ID NO: 226 - protein, 12 aa, Artificial sequence
  an artificially synthesized sequence
TSTPGRSANPRG

SEQ ID NO: 227 - protein, 12 aa, Artificial sequence
  an artificially synthesized sequence
TSTQGRSANPRG

SEQ ID NO: 228 - protein, 12 aa, Artificial sequence
  an artificially synthesized sequence
TSTVGRSANPRG

SEQ ID NO: 229 - protein, 12 aa, Artificial sequence
  an artificially synthesized sequence
TSTWGRSANPRG

SEQ ID NO: 230 - protein, 12 aa, Artificial sequence
  an artificially synthesized sequence
TSTSARSANPRG

SEQ ID NO: 231 - protein, 12 aa, Artificial sequence
  an artificially synthesized sequence
TSTSERSANPRG

SEQ ID NO: 232 - protein, 12 aa, Artificial sequence
  an artificially synthesized sequence
TSTSFRSANPRG

SEQ ID NO: 233 - protein, 12 aa, Artificial sequence
  an artificially synthesized sequence
TSTSHRSANPRG

SEQ ID NO: 234 - protein, 12 aa, Artificial sequence
  an artificially synthesized sequence
TSTSIRSANPRG

SEQ ID NO: 235 - protein, 12 aa, Artificial sequence
  an artificially synthesized sequence
TSTSKRSANPRG

SEQ ID NO: 236 - protein, 12 aa, Artificial sequence
  an artificially synthesized sequence
TSTSLRSANPRG

SEQ ID NO: 237 - protein, 12 aa, Artificial sequence
  an artificially synthesized sequence
TSTSMRSANPRG

SEQ ID NO: 238 - protein, 12 aa, Artificial sequence
  an artificially synthesized sequence
TSTSNRSANPRG

SEQ ID NO: 239 - protein, 12 aa, Artificial sequence
  an artificially synthesized sequence
TSTSPRSANPRG

SEQ ID NO: 240 - protein, 12 aa, Artificial sequence
  an artificially synthesized sequence
TSTSQRSANPRG

SEQ ID NO: 241 - protein, 12 aa, Artificial sequence
  an artificially synthesized sequence
TSTSRRSANPRG

SEQ ID NO: 242 - protein, 12 aa, Artificial sequence
  an artificially synthesized sequence
TSTSTRSANPRG

SEQ ID NO: 243 - protein, 12 aa, Artificial sequence
  an artificially synthesized sequence
TSTSVRSANPRG

SEQ ID NO: 244 - protein, 12 aa, Artificial sequence
  an artificially synthesized sequence
TSTSWRSANPRG

SEQ ID NO: 245 - protein, 12 aa, Artificial sequence
  an artificially synthesized sequence
TSTSYRSANPRG

SEQ ID NO: 246 - protein, 12 aa, Artificial sequence
  an artificially synthesized sequence
TSTSGRAANPRG

SEQ ID NO: 247 - protein, 12 aa, Artificial sequence
  an artificially synthesized sequence
TSTSGRDANPRG

SEQ ID NO: 248 - protein, 12 aa, Artificial sequence
  an artificially synthesized sequence
TSTSGREANPRG

SEQ ID NO: 249 - protein, 12 aa, Artificial sequence
  an artificially synthesized sequence
TSTSGRGANPRG

SEQ ID NO: 250 - protein, 12 aa, Artificial sequence
  an artificially synthesized sequence
TSTSGRHANPRG

SEQ ID NO: 251 - protein, 12 aa, Artificial sequence
  an artificially synthesized sequence
TSTSGRIANPRG

SEQ ID NO: 252 - protein, 12 aa, Artificial sequence
  an artificially synthesized sequence
TSTSGRKANPRG

SEQ ID NO: 253 - protein, 12 aa, Artificial sequence
  an artificially synthesized sequence
TSTSGRLANPRG

SEQ ID NO: 254 - protein, 12 aa, Artificial sequence
  an artificially synthesized sequence
TSTSGRMANPRG

SEQ ID NO: 255 - protein, 12 aa, Artificial sequence
  an artificially synthesized sequence
TSTSGRNANPRG

SEQ ID NO: 256 - protein, 12 aa, Artificial sequence
  an artificially synthesized sequence
TSTSGRPANPRG

SEQ ID NO: 257 - protein, 12 aa, Artificial sequence
  an artificially synthesized sequence
TSTSGRQANPRG

SEQ ID NO: 258 - protein, 12 aa, Artificial sequence
  an artificially synthesized sequence
TSTSGRRANPRG

SEQ ID NO: 259 - protein, 12 aa, Artificial sequence
  an artificially synthesized sequence
TSTSGRTANPRG

SEQ ID NO: 260 - protein, 12 aa, Artificial sequence
  an artificially synthesized sequence
TSTSGRVANPRG

SEQ ID NO: 261 - protein, 12 aa, Artificial sequence
  an artificially synthesized sequence
TSTSGRWANPRG

SEQ ID NO: 262 - protein, 12 aa, Artificial sequence
  an artificially synthesized sequence
TSTSGRYANPRG

SEQ ID NO: 263 - protein, 12 aa, Artificial sequence
  an artificially synthesized sequence
TSTSGRSENPRG

SEQ ID NO: 264 - protein, 12 aa, Artificial sequence
  an artificially synthesized sequence
TSTSGRSFNPRG

SEQ ID NO: 265 - protein, 12 aa, Artificial sequence
  an artificially synthesized sequence
TSTSGRSKNPRG

SEQ ID NO: 266 - protein, 12 aa, Artificial sequence
  an artificially synthesized sequence
TSTSGRSMNPRG

SEQ ID NO: 267 - protein, 12 aa, Artificial sequence
  an artificially synthesized sequence
TSTSGRSNNPRG

SEQ ID NO: 268 - protein, 12 aa, Artificial sequence
  an artificially synthesized sequence
TSTSGRSPNPRG

SEQ ID NO: 269 - protein, 12 aa, Artificial sequence
  an artificially synthesized sequence
TSTSGRSQNPRG

SEQ ID NO: 270 - protein, 12 aa, Artificial sequence
  an artificially synthesized sequence
TSTSGRSRNPRG

SEQ ID NO: 271 - protein, 12 aa, Artificial sequence
  an artificially synthesized sequence
TSTSGRSSNPRG

SEQ ID NO: 272 - protein, 12 aa, Artificial sequence
  an artificially synthesized sequence
TSTSGRSWNPRG

SEQ ID NO: 273 - protein, 12 aa, Artificial sequence
  an artificially synthesized sequence
TSTSGRSYNPRG

SEQ ID NO: 274 - protein, 12 aa, Artificial sequence
  an artificially synthesized sequence
TSTSGRSAAPRG

SEQ ID NO: 275 - protein, 12 aa, Artificial sequence
  an artificially synthesized sequence
TSTSGRSADPRG

SEQ ID NO: 276 - protein, 12 aa, Artificial sequence
  an artificially synthesized sequence
TSTSGRSAEPRG

SEQ ID NO: 277 - protein, 12 aa, Artificial sequence
  an artificially synthesized sequence
TSTSGRSAFPRG

SEQ ID NO: 278 - protein, 12 aa, Artificial sequence
  an artificially synthesized sequence
TSTSGRSAGPRG

SEQ ID NO: 279 - protein, 12 aa, Artificial sequence
  an artificially synthesized sequence
TSTSGRSAKPRG

SEQ ID NO: 280 - protein, 12 aa, Artificial sequence
  an artificially synthesized sequence
TSTSGRSALPRG

SEQ ID NO: 281 - protein, 12 aa, Artificial sequence
  an artificially synthesized sequence
TSTSGRSAMPRG

SEQ ID NO: 282 - protein, 12 aa, Artificial sequence
  an artificially synthesized sequence
TSTSGRSAPPRG

SEQ ID NO: 283 - protein, 12 aa, Artificial sequence
  an artificially synthesized sequence
TSTSGRSAQPRG

SEQ ID NO: 284 - protein, 12 aa, Artificial sequence
  an artificially synthesized sequence
TSTSGRSAVPRG

SEQ ID NO: 285 - protein, 12 aa, Artificial sequence
  an artificially synthesized sequence
TSTSGRSAWPRG

SEQ ID NO: 286 - protein, 12 aa, Artificial sequence
  an artificially synthesized sequence
TSTSGRSAYPRG

SEQ ID NO: 287 - protein, 12 aa, Artificial sequence
  an artificially synthesized sequence
TSTSGRSANARG

SEQ ID NO: 288 - protein, 12 aa, Artificial sequence
  an artificially synthesized sequence
TSTSGRSANDRG

SEQ ID NO: 289 - protein, 12 aa, Artificial sequence
  an artificially synthesized sequence
TSTSGRSANERG

SEQ ID NO: 290 - protein, 12 aa, Artificial sequence
  an artificially synthesized sequence
TSTSGRSANFRG

SEQ ID NO: 291 - protein, 12 aa, Artificial sequence
  an artificially synthesized sequence
TSTSGRSANGRG

SEQ ID NO: 292 - protein, 12 aa, Artificial sequence
  an artificially synthesized sequence
TSTSGRSANIRG

SEQ ID NO: 293 - protein, 12 aa, Artificial sequence
  an artificially synthesized sequence
TSTSGRSANKRG

SEQ ID NO: 294 - protein, 12 aa, Artificial sequence
  an artificially synthesized sequence
TSTSGRSANNRG

SEQ ID NO: 295 - protein, 12 aa, Artificial sequence
  an artificially synthesized sequence
TSTSGRSANQRG

SEQ ID NO: 296 - protein, 12 aa, Artificial sequence
  an artificially synthesized sequence
TSTSGRSANSRG

SEQ ID NO: 297 - protein, 12 aa, Artificial sequence
  an artificially synthesized sequence
TSTSGRSANTRG

SEQ ID NO: 298 - protein, 12 aa, Artificial sequence
  an artificially synthesized sequence
TSTSGRSANWRG

SEQ ID NO: 299 - protein, 12 aa, Artificial sequence
  an artificially synthesized sequence
TSDSGRSANPRG

SEQ ID NO: 300 - protein, 12 aa, Artificial sequence
  an artificially synthesized sequence
TSISGRSANPRG

SEQ ID NO: 301 - protein, 12 aa, Artificial sequence
  an artificially synthesized sequence
TSSSGRSANPRG

SEQ ID NO: 302 - protein, 12 aa, Artificial sequence
  an artificially synthesized sequence
TSTHGRSANPRG

SEQ ID NO: 303 - protein, 12 aa, Artificial sequence
  an artificially synthesized sequence
TSTKGRSANPRG

SEQ ID NO: 304 - protein, 12 aa, Artificial sequence
  an artificially synthesized sequence
TSTTGRSANPRG

SEQ ID NO: 305 - protein, 12 aa, Artificial sequence
  an artificially synthesized sequence
TSTYGRSANPRG

SEQ ID NO: 306 - protein, 12 aa, Artificial sequence
  an artificially synthesized sequence
TSTSDRSANPRG

SEQ ID NO: 307 - protein, 12 aa, Artificial sequence
  an artificially synthesized sequence
TSTSSRSANPRG

SEQ ID NO: 308 - protein, 12 aa, Artificial sequence
  an artificially synthesized sequence
TSTSGRFANPRG

SEQ ID NO: 309 - protein, 12 aa, Artificial sequence
  an artificially synthesized sequence
TSTSGRSDNPRG

SEQ ID NO: 310 - protein, 12 aa, Artificial sequence
  an artificially synthesized sequence
TSTSGRSHNPRG

SEQ ID NO: 311 - protein, 12 aa, Artificial sequence
  an artificially synthesized sequence
TSTSGRSINPRG

SEQ ID NO: 312 - protein, 12 aa, Artificial sequence
  an artificially synthesized sequence
TSTSGRSLNPRG

SEQ ID NO: 313 - protein, 12 aa, Artificial sequence
  an artificially synthesized sequence
TSTSGRSTNPRG

SEQ ID NO: 314 - protein, 12 aa, Artificial sequence
  an artificially synthesized sequence
TSTSGRSVNPRG

SEQ ID NO: 315 - protein, 12 aa, Artificial sequence
  an artificially synthesized sequence
TSTSGRSAHPRG

SEQ ID NO: 316 - protein, 12 aa, Artificial sequence
  an artificially synthesized sequence
TSTSGRSAIPRG

SEQ ID NO: 317 - protein, 12 aa, Artificial sequence
  an artificially synthesized sequence
TSTSGRSARPRG

SEQ ID NO: 318 - protein, 12 aa, Artificial sequence
  an artificially synthesized sequence
TSTSGRSASPRG

SEQ ID NO: 319 - protein, 12 aa, Artificial sequence
  an artificially synthesized sequence
TSTSGRSATPRG

SEQ ID NO: 320 - protein, 12 aa, Artificial sequence
  an artificially synthesized sequence
TSTSGRSANHRG

SEQ ID NO: 321 - protein, 12 aa, Artificial sequence
  an artificially synthesized sequence
TSTSGRSANLRG

SEQ ID NO: 322 - protein, 12 aa, Artificial sequence
  an artificially synthesized sequence
TSTSGRSANMRG

SEQ ID NO: 323 - protein, 12 aa, Artificial sequence
  an artificially synthesized sequence
TSTSGRSANRRG

SEQ ID NO: 324 - protein, 12 aa, Artificial sequence
  an artificially synthesized sequence
TSTSGRSANVRG

SEQ ID NO: 325 - protein, 12 aa, Artificial sequence
  an artificially synthesized sequence
TSTSGRSANYRG

SEQ ID NO: 326 - protein, 12 aa, Artificial sequence
  an artificially synthesized sequence
TSGSGRSAVPRG

SEQ ID NO: 327 - protein, 12 aa, Artificial sequence
  an artificially synthesized sequence
TSGSGRSAYPRG

SEQ ID NO: 328 - protein, 12 aa, Artificial sequence
  an artificially synthesized sequence
TSGSGRSANQRG

SEQ ID NO: 329 - protein, 12 aa, Artificial sequence
  an artificially synthesized sequence
TSGSGRSANIRG

SEQ ID NO: 330 - protein, 12 aa, Artificial sequence
  an artificially synthesized sequence
TSGSGRSANFRG

SEQ ID NO: 331 - protein, 12 aa, Artificial sequence
  an artificially synthesized sequence
TSGSGRSANSRG

SEQ ID NO: 332 - protein, 12 aa, Artificial sequence
  an artificially synthesized sequence
TSQSGRSAVPRG

SEQ ID NO: 333 - protein, 12 aa, Artificial sequence
  an artificially synthesized sequence
TSQSGRSAYPRG

SEQ ID NO: 334 - protein, 12 aa, Artificial sequence
  an artificially synthesized sequence
TSQSGRSANARG

SEQ ID NO: 335 - protein, 12 aa, Artificial sequence
  an artificially synthesized sequence
TSQSGRSANIRG

SEQ ID NO: 336 - protein, 12 aa, Artificial sequence
  an artificially synthesized sequence
TSQSGRSANFRG

SEQ ID NO: 337 - protein, 12 aa, Artificial sequence
  an artificially synthesized sequence
TSQSGRSANSRG

SEQ ID NO: 338 - protein, 12 aa, Artificial sequence
  an artificially synthesized sequence
TSPSGRSAVPRG

SEQ ID NO: 339 - protein, 12 aa, Artificial sequence
  an artificially synthesized sequence
TSPSGRSANQRG

SEQ ID NO: 340 - protein, 12 aa, Artificial sequence
  an artificially synthesized sequence
TSPSGRSANARG

SEQ ID NO: 341 - protein, 12 aa, Artificial sequence
  an artificially synthesized sequence
TSPSGRSANIRG

SEQ ID NO: 342 - protein, 12 aa, Artificial sequence
  an artificially synthesized sequence
TSPSGRSANFRG

SEQ ID NO: 343 - protein, 12 aa, Artificial sequence
  an artificially synthesized sequence
TSPSGRSANSRG

SEQ ID NO: 344 - protein, 12 aa, Artificial sequence
  an artificially synthesized sequence
TSASGRSAVPRG

SEQ ID NO: 345 - protein, 12 aa, Artificial sequence
  an artificially synthesized sequence
TSASGRSAYPRG

SEQ ID NO: 346 - protein, 12 aa, Artificial sequence
  an artificially synthesized sequence
TSASGRSANQRG

SEQ ID NO: 347 - protein, 12 aa, Artificial sequence
  an artificially synthesized sequence
TSASGRSANARG

SEQ ID NO: 348 - protein, 12 aa, Artificial sequence
  an artificially synthesized sequence
TSASGRSANIRG

SEQ ID NO: 349 - protein, 12 aa, Artificial sequence
  an artificially synthesized sequence
TSASGRSANFRG

SEQ ID NO: 350 - protein, 12 aa, Artificial sequence
  an artificially synthesized sequence
TSASGRSANSRG

SEQ ID NO: 351 - protein, 12 aa, Artificial sequence
  an artificially synthesized sequence
TSYSGRSENPRG

SEQ ID NO: 352 - protein, 12 aa, Artificial sequence
  an artificially synthesized sequence
TSGSGRSENPRG

SEQ ID NO: 353 - protein, 12 aa, Artificial sequence
  an artificially synthesized sequence
TSQSGRSENPRG

SEQ ID NO: 354 - protein, 12 aa, Artificial sequence
  an artificially synthesized sequence
TSPSGRSENPRG

SEQ ID NO: 355 - protein, 12 aa, Artificial sequence
  an artificially synthesized sequence
TSASGRSENPRG

SEQ ID NO: 356 - protein, 12 aa, Artificial sequence
  an artificially synthesized sequence
TSHSGRSENPRG

SEQ ID NO: 357 - protein, 12 aa, Artificial sequence
  an artificially synthesized sequence
TSTSGRSENQRG

SEQ ID NO: 358 - protein, 12 aa, Artificial sequence
  an artificially synthesized sequence
TSTSGRSENARG

SEQ ID NO: 359 - protein, 12 aa, Artificial sequence
  an artificially synthesized sequence
TSTSGRSENIRG

SEQ ID NO: 360 - protein, 12 aa, Artificial sequence
  an artificially synthesized sequence
TSTSGRSENFRG

SEQ ID NO: 361 - protein, 12 aa, Artificial sequence
  an artificially synthesized sequence
TSTSGRSENSRG

SEQ ID NO: 362 - protein, 12 aa, Artificial sequence
  an artificially synthesized sequence
TSYSGRSAEPRG

SEQ ID NO: 363 - protein, 12 aa, Artificial sequence
  an artificially synthesized sequence
TSGSGRSAEPRG

SEQ ID NO: 364 - protein, 12 aa, Artificial sequence
  an artificially synthesized sequence
TSQSGRSAEPRG

SEQ ID NO: 365 - protein, 12 aa, Artificial sequence
  an artificially synthesized sequence
TSPSGRSAEPRG

SEQ ID NO: 366 - protein, 12 aa, Artificial sequence
  an artificially synthesized sequence
TSASGRSAEPRG

SEQ ID NO: 367 - protein, 12 aa, Artificial sequence
  an artificially synthesized sequence
TSHSGRSAEPRG

SEQ ID NO: 368 - protein, 12 aa, Artificial sequence
  an artificially synthesized sequence
TSTSGRSAEQRG

SEQ ID NO: 369 - protein, 12 aa, Artificial sequence
  an artificially synthesized sequence
TSTSGRSAEARG

SEQ ID NO: 370 - protein, 12 aa, Artificial sequence
  an artificially synthesized sequence
TSTSGRSAEIRG

SEQ ID NO: 371 - protein, 12 aa, Artificial sequence
  an artificially synthesized sequence
TSTSGRSAEFRG

SEQ ID NO: 372 - protein, 12 aa, Artificial sequence
  an artificially synthesized sequence
TSTSGRSAESRG

SEQ ID NO: 373 - protein, 12 aa, Artificial sequence
  an artificially synthesized sequence
TSGTGRSANPRG

SEQ ID NO: 374 - protein, 12 aa, Artificial sequence
  an artificially synthesized sequence
TSGKGRSANPRG

SEQ ID NO: 375 - protein, 12 aa, Artificial sequence
  an artificially synthesized sequence
TSGSGRSAIPRG

SEQ ID NO: 376 - protein, 12 aa, Artificial sequence
  an artificially synthesized sequence
TSGSGRSASPRG

SEQ ID NO: 377 - protein, 12 aa, Artificial sequence
  an artificially synthesized sequence
TSGSGRSAHPRG

SEQ ID NO: 378 - protein, 12 aa, Artificial sequence
  an artificially synthesized sequence
TSGSGRSANYRG

SEQ ID NO: 379 - protein, 12 aa, Artificial sequence
  an artificially synthesized sequence
TSGSGRSANVRG

SEQ ID NO: 380 - protein, 12 aa, Artificial sequence
  an artificially synthesized sequence
TSGSGRSANHRG

SEQ ID NO: 381 - protein, 12 aa, Artificial sequence
  an artificially synthesized sequence
TSQTGRSANPRG

SEQ ID NO: 382 - protein, 12 aa, Artificial sequence
  an artificially synthesized sequence
TSQKGRSANPRG

SEQ ID NO: 383 - protein, 12 aa, Artificial sequence
  an artificially synthesized sequence
TSQSGRSAIPRG

SEQ ID NO: 384 - protein, 12 aa, Artificial sequence
  an artificially synthesized sequence
TSQSGRSASPRG

SEQ ID NO: 385 - protein, 12 aa, Artificial sequence
  an artificially synthesized sequence
TSQSGRSAHPRG

SEQ ID NO: 386 - protein, 12 aa, Artificial sequence
  an artificially synthesized sequence
TSQSGRSANYRG

SEQ ID NO: 387 - protein, 12 aa, Artificial sequence
  an artificially synthesized sequence
TSQSGRSANVRG

SEQ ID NO: 388 - protein, 12 aa, Artificial sequence
  an artificially synthesized sequence
TSQSGRSANHRG

SEQ ID NO: 389 - protein, 12 aa, Artificial sequence
  an artificially synthesized sequence
TSPTGRSANPRG

SEQ ID NO: 390 - protein, 12 aa, Artificial sequence
  an artificially synthesized sequence
TSPKGRSANPRG

SEQ ID NO: 391 - protein, 12 aa, Artificial sequence
  an artificially synthesized sequence
TSPSGRSAIPRG

SEQ ID NO: 392 - protein, 12 aa, Artificial sequence
  an artificially synthesized sequence
TSPSGRSATPRG

SEQ ID NO: 393 - protein, 12 aa, Artificial sequence
  an artificially synthesized sequence
TSPSGRSASPRG

SEQ ID NO: 394 - protein, 12 aa, Artificial sequence
  an artificially synthesized sequence
TSPSGRSAHPRG

SEQ ID NO: 395 - protein, 12 aa, Artificial sequence
  an artificially synthesized sequence
TSPSGRSANYRG

SEQ ID NO: 396 - protein, 12 aa, Artificial sequence
  an artificially synthesized sequence
TSPSGRSANVRG

SEQ ID NO: 397 - protein, 12 aa, Artificial sequence
  an artificially synthesized sequence
TSPSGRSANHRG

SEQ ID NO: 398 - protein, 12 aa, Artificial sequence
  an artificially synthesized sequence
TSATGRSANPRG

SEQ ID NO: 399 - protein, 12 aa, Artificial sequence
  an artificially synthesized sequence
TSAKGRSANPRG

SEQ ID NO: 400 - protein, 12 aa, Artificial sequence
  an artificially synthesized sequence
TSASGRSAIPRG

SEQ ID NO: 401 - protein, 12 aa, Artificial sequence
  an artificially synthesized sequence
TSASGRSASPRG

SEQ ID NO: 402 - protein, 12 aa, Artificial sequence
  an artificially synthesized sequence
TSASGRSAHPRG

SEQ ID NO: 403 - protein, 12 aa, Artificial sequence
  an artificially synthesized sequence
TSASGRSANYRG

SEQ ID NO: 404 - protein, 12 aa, Artificial sequence
  an artificially synthesized sequence
TSASGRSANVRG

SEQ ID NO: 405 - protein, 12 aa, Artificial sequence
  an artificially synthesized sequence
TSASGRSANHRG

SEQ ID NO: 406 - protein, 12 aa, Artificial sequence
  an artificially synthesized sequence
TSYTGRSANPRG

SEQ ID NO: 407 - protein, 12 aa, Artificial sequence
  an artificially synthesized sequence
TSYKGRSANPRG

SEQ ID NO: 408 - protein, 12 aa, Artificial sequence
  an artificially synthesized sequence
TSYSGRSAIPRG

SEQ ID NO: 409 - protein, 12 aa, Artificial sequence
  an artificially synthesized sequence
TSYSGRSATPRG

SEQ ID NO: 410 - protein, 12 aa, Artificial sequence
  an artificially synthesized sequence
TSYSGRSASPRG

SEQ ID NO: 411 - protein, 12 aa, Artificial sequence
  an artificially synthesized sequence
TSYSGRSAHPRG

SEQ ID NO: 412 - protein, 12 aa, Artificial sequence
  an artificially synthesized sequence
TSYSGRSANARG

SEQ ID NO: 413 - protein, 12 aa, Artificial sequence
  an artificially synthesized sequence
TSYSGRSANYRG

SEQ ID NO: 414 - protein, 12 aa, Artificial sequence
  an artificially synthesized sequence
TSYSGRSANVRG

SEQ ID NO: 415 - protein, 12 aa, Artificial sequence
  an artificially synthesized sequence
TSYSGRSANHRG

SEQ ID NO: 416 - protein, 12 aa, Artificial sequence
  an artificially synthesized sequence
TSSTGRSANPRG

SEQ ID NO: 417 - protein, 12 aa, Artificial sequence
  an artificially synthesized sequence
TSSKGRSANPRG

SEQ ID NO: 418 - protein, 12 aa, Artificial sequence
  an artificially synthesized sequence
TSSSGRSAVPRG

SEQ ID NO: 419 - protein, 12 aa, Artificial sequence
  an artificially synthesized sequence
TSSSGRSAIPRG

SEQ ID NO: 420 - protein, 12 aa, Artificial sequence
  an artificially synthesized sequence
TSSSGRSASPRG

SEQ ID NO: 421 - protein, 12 aa, Artificial sequence
  an artificially synthesized sequence
TSSSGRSAHPRG

SEQ ID NO: 422 - protein, 12 aa, Artificial sequence
  an artificially synthesized sequence
TSSSGRSANARG

SEQ ID NO: 423 - protein, 12 aa, Artificial sequence
  an artificially synthesized sequence
TSSSGRSANFRG

SEQ ID NO: 424 - protein, 12 aa, Artificial sequence
  an artificially synthesized sequence
TSSSGRSANYRG

SEQ ID NO: 425 - protein, 12 aa, Artificial sequence
  an artificially synthesized sequence
TSSSGRSANVRG

SEQ ID NO: 426 - protein, 12 aa, Artificial sequence
  an artificially synthesized sequence
TSSSGRSANHRG

SEQ ID NO: 427 - protein, 12 aa, Artificial sequence
  an artificially synthesized sequence
TSITGRSANPRG

SEQ ID NO: 428 - protein, 12 aa, Artificial sequence
  an artificially synthesized sequence
TSIKGRSANPRG

SEQ ID NO: 429 - protein, 12 aa, Artificial sequence
  an artificially synthesized sequence
TSISGRSAVPRG

SEQ ID NO: 430 - protein, 12 aa, Artificial sequence
  an artificially synthesized sequence
TSISGRSAIPRG

SEQ ID NO: 431 - protein, 12 aa, Artificial sequence
  an artificially synthesized sequence
TSISGRSATPRG

SEQ ID NO: 432 - protein, 12 aa, Artificial sequence
  an artificially synthesized sequence
TSISGRSASPRG

SEQ ID NO: 433 - protein, 12 aa, Artificial sequence
  an artificially synthesized sequence
TSISGRSAHPRG

SEQ ID NO: 434 - protein, 12 aa, Artificial sequence
  an artificially synthesized sequence
TSISGRSANARG

SEQ ID NO: 435 - protein, 12 aa, Artificial sequence
  an artificially synthesized sequence
TSISGRSANFRG

SEQ ID NO: 436 - protein, 12 aa, Artificial sequence
  an artificially synthesized sequence
TSISGRSANYRG

SEQ ID NO: 437 - protein, 12 aa, Artificial sequence
  an artificially synthesized sequence
TSISGRSANVRG

SEQ ID NO: 438 - protein, 12 aa, Artificial sequence
  an artificially synthesized sequence
TSISGRSANHRG

SEQ ID NO: 439 - protein, 12 aa, Artificial sequence
  an artificially synthesized sequence
TSTTGRSAVPRG

SEQ ID NO: 440 - protein, 12 aa, Artificial sequence
  an artificially synthesized sequence
TSTTGRSAIPRG

SEQ ID NO: 441 - protein, 12 aa, Artificial sequence
  an artificially synthesized sequence
TSTTGRSATPRG

SEQ ID NO: 442 - protein, 12 aa, Artificial sequence
  an artificially synthesized sequence
TSTTGRSAHPRG

SEQ ID NO: 443 - protein, 12 aa, Artificial sequence
  an artificially synthesized sequence
TSTTGRSANARG

SEQ ID NO: 444 - protein, 12 aa, Artificial sequence
  an artificially synthesized sequence
TSTTGRSANFRG

SEQ ID NO: 445 - protein, 12 aa, Artificial sequence
  an artificially synthesized sequence
TSTTGRSANYRG

SEQ ID NO: 446 - protein, 12 aa, Artificial sequence
  an artificially synthesized sequence
TSTTGRSANVRG

SEQ ID NO: 447 - protein, 12 aa, Artificial sequence
  an artificially synthesized sequence
TSTTGRSANHRG

SEQ ID NO: 448 - protein, 12 aa, Artificial sequence
  an artificially synthesized sequence
TSTKGRSAVPRG

SEQ ID NO: 449 - protein, 12 aa, Artificial sequence
  an artificially synthesized sequence
TSTKGRSAIPRG

SEQ ID NO: 450 - protein, 12 aa, Artificial sequence
  an artificially synthesized sequence
TSTKGRSATPRG

SEQ ID NO: 451 - protein, 12 aa, Artificial sequence
  an artificially synthesized sequence
TSTKGRSASPRG

SEQ ID NO: 452 - protein, 12 aa, Artificial sequence
  an artificially synthesized sequence
TSTKGRSAHPRG

SEQ ID NO: 453 - protein, 12 aa, Artificial sequence
  an artificially synthesized sequence
TSTKGRSANARG

SEQ ID NO: 454 - protein, 12 aa, Artificial sequence
  an artificially synthesized sequence
TSTKGRSANFRG

SEQ ID NO: 455 - protein, 12 aa, Artificial sequence
  an artificially synthesized sequence
TSTKGRSANYRG

SEQ ID NO: 456 - protein, 12 aa, Artificial sequence
  an artificially synthesized sequence
TSTKGRSANVRG

SEQ ID NO: 457 - protein, 12 aa, Artificial sequence
  an artificially synthesized sequence
TSTKGRSANHRG

SEQ ID NO: 458 - protein, 12 aa, Artificial sequence
  an artificially synthesized sequence
TSTSGRSAVYRG

SEQ ID NO: 459 - protein, 12 aa, Artificial sequence
  an artificially synthesized sequence
TSTSGRSAVVRG

SEQ ID NO: 460 - protein, 12 aa, Artificial sequence
  an artificially synthesized sequence
TSTSGRSAVHRG

SEQ ID NO: 461 - protein, 12 aa, Artificial sequence
  an artificially synthesized sequence
TSTSGRSAIYRG

SEQ ID NO: 462 - protein, 12 aa, Artificial sequence
  an artificially synthesized sequence
TSTSGRSAIVRG

SEQ ID NO: 463 - protein, 12 aa, Artificial sequence
  an artificially synthesized sequence
TSTSGRSAIHRG

SEQ ID NO: 464 - protein, 12 aa, Artificial sequence
  an artificially synthesized sequence
TSTSGRSASYRG

SEQ ID NO: 465 - protein, 12 aa, Artificial sequence
  an artificially synthesized sequence
TSTSGRSASVRG

SEQ ID NO: 466 - protein, 12 aa, Artificial sequence
  an artificially synthesized sequence
TSTSGRSASHRG

SEQ ID NO: 467 - protein, 12 aa, Artificial sequence
  an artificially synthesized sequence
TSTSGRSAHYRG

SEQ ID NO: 468 - protein, 12 aa, Artificial sequence
  an artificially synthesized sequence
TSTSGRSAHVRG

SEQ ID NO: 469 - protein, 12 aa, Artificial sequence
  an artificially synthesized sequence
TSTSGRSAHHRG

SEQ ID NO: 470 - protein, 12 aa, Artificial sequence
  an artificially synthesized sequence
TSPSGRSEVPRG

SEQ ID NO: 471 - protein, 12 aa, Artificial sequence
  an artificially synthesized sequence
TSPSGRSAEPRG

SEQ ID NO: 472 - protein, 12 aa, Artificial sequence
  an artificially synthesized sequence
TSPSGRSAGPRG

SEQ ID NO: 473 - protein, 12 aa, Artificial sequence
  an artificially synthesized sequence
TSASGRSENARG

SEQ ID NO: 474 - protein, 12 aa, Artificial sequence
  an artificially synthesized sequence
TSASGRSAEARG

SEQ ID NO: 475 - protein, 12 aa, Artificial sequence
  an artificially synthesized sequence
TSASGRSAGARG

SEQ ID NO: 476 - protein, 12 aa, Artificial sequence
  an artificially synthesized sequence
TSGTGRSATPRG

SEQ ID NO: 477 - protein, 12 aa, Artificial sequence
  an artificially synthesized sequence
TSGSGRSATYRG

SEQ ID NO: 478 - protein, 12 aa, Artificial sequence
  an artificially synthesized sequence
TSGSGRSATVRG

SEQ ID NO: 479 - protein, 12 aa, Artificial sequence
  an artificially synthesized sequence
TSGSGRSATHRG

SEQ ID NO: 480 - protein, 12 aa, Artificial sequence
  an artificially synthesized sequence
TSGTGRSATYRG

SEQ ID NO: 481 - protein, 12 aa, Artificial sequence
  an artificially synthesized sequence
TSGTGRSATVRG

SEQ ID NO: 482 - protein, 12 aa, Artificial sequence
  an artificially synthesized sequence
TSGTGRSATHRG

SEQ ID NO: 483 - protein, 12 aa, Artificial sequence
  an artificially synthesized sequence
TSGSGRSETPRG

SEQ ID NO: 484 - protein, 12 aa, Artificial sequence
  an artificially synthesized sequence
TSGTGRSETPRG

SEQ ID NO: 485 - protein, 12 aa, Artificial sequence
  an artificially synthesized sequence
TSGSGRSETYRG

SEQ ID NO: 486 - protein, 12 aa, Artificial sequence
  an artificially synthesized sequence
TSGSGRSETVRG

SEQ ID NO: 487 - protein, 12 aa, Artificial sequence
  an artificially synthesized sequence
TSGSGRSETHRG

SEQ ID NO: 488 - protein, 12 aa, Artificial sequence
  an artificially synthesized sequence
TSYTGRSAVPRG

SEQ ID NO: 489 - protein, 12 aa, Artificial sequence
  an artificially synthesized sequence
TSYSGRSAVYRG

SEQ ID NO: 490 - protein, 12 aa, Artificial sequence
  an artificially synthesized sequence
TSYSGRSAVVRG

SEQ ID NO: 491 - protein, 12 aa, Artificial sequence
  an artificially synthesized sequence
TSYSGRSAVHRG

SEQ ID NO: 492 - protein, 12 aa, Artificial sequence
  an artificially synthesized sequence
TSYTGRSAVYRG

SEQ ID NO: 493 - protein, 12 aa, Artificial sequence
  an artificially synthesized sequence
TSYTGRSAVVRG

SEQ ID NO: 494 - protein, 12 aa, Artificial sequence
  an artificially synthesized sequence
TSYTGRSAVHRG

SEQ ID NO: 495 - protein, 12 aa, Artificial sequence
  an artificially synthesized sequence
TSYSGRSEVPRG

SEQ ID NO: 496 - protein, 12 aa, Artificial sequence
  an artificially synthesized sequence
TSYTGRSEVPRG

SEQ ID NO: 497 - protein, 12 aa, Artificial sequence
  an artificially synthesized sequence
TSYSGRSEVYRG

SEQ ID NO: 498 - protein, 12 aa, Artificial sequence
  an artificially synthesized sequence
TSYSGRSEVVRG

SEQ ID NO: 499 - protein, 12 aa, Artificial sequence
  an artificially synthesized sequence
TSYSGRSEVHRG

SEQ ID NO: 500 - protein, 12 aa, Artificial sequence
  an artificially synthesized sequence
TSYTGRSAVPGG

SEQ ID NO: 501 - protein, 12 aa, Artificial sequence
  an artificially synthesized sequence
TSYSGRSAVYGG

SEQ ID NO: 502 - protein, 12 aa, Artificial sequence
  an artificially synthesized sequence
TSYSGRSAVVGG

SEQ ID NO: 503 - protein, 12 aa, Artificial sequence
  an artificially synthesized sequence
TSYSGRSAVHGG

SEQ ID NO: 504 - protein, 12 aa, Artificial sequence
  an artificially synthesized sequence
TSYTGRSAVYGG

SEQ ID NO: 505 - protein, 12 aa, Artificial sequence
  an artificially synthesized sequence
TSYTGRSAVVGG

SEQ ID NO: 506 - protein, 12 aa, Artificial sequence
  an artificially synthesized sequence
TSYTGRSAVHGG

SEQ ID NO: 507 - protein, 8 aa, Artificial sequence
  an artificially synthesized sequence
ASGRSANP

SEQ ID NO: 508 - protein, 8 aa, Artificial sequence
  an artificially synthesized sequence
ESGRSANP

SEQ ID NO: 509 - protein, 8 aa, Artificial sequence
  an artificially synthesized sequence
FSGRSANP

SEQ ID NO: 510 - protein, 8 aa, Artificial sequence
  an artificially synthesized sequence
GSGRSANP

SEQ ID NO: 511 - protein, 8 aa, Artificial sequence
  an artificially synthesized sequence
HSGRSANP

SEQ ID NO: 512 - protein, 8 aa, Artificial sequence
  an artificially synthesized sequence
KSGRSANP

SEQ ID NO: 513 - protein, 8 aa, Artificial sequence
  an artificially synthesized sequence
MSGRSANP

SEQ ID NO: 514 - protein, 8 aa, Artificial sequence
  an artificially synthesized sequence
NSGRSANP

SEQ ID NO: 515 - protein, 8 aa, Artificial sequence
  an artificially synthesized sequence
PSGRSANP

SEQ ID NO: 516 - protein, 8 aa, Artificial sequence
  an artificially synthesized sequence
QSGRSANP

SEQ ID NO: 517 - protein, 8 aa, Artificial sequence
  an artificially synthesized sequence
WSGRSANP

SEQ ID NO: 518 - protein, 8 aa, Artificial sequence
  an artificially synthesized sequence
YSGRSANP

SEQ ID NO: 519 - protein, 8 aa, Artificial sequence
  an artificially synthesized sequence
TAGRSANP

SEQ ID NO: 520 - protein, 8 aa, Artificial sequence
  an artificially synthesized sequence
TDGRSANP

SEQ ID NO: 521 - protein, 8 aa, Artificial sequence
  an artificially synthesized sequence
TEGRSANP

SEQ ID NO: 522 - protein, 8 aa, Artificial sequence
  an artificially synthesized sequence
TFGRSANP

SEQ ID NO: 523 - protein, 8 aa, Artificial sequence
  an artificially synthesized sequence
TLGRSANP

SEQ ID NO: 524 - protein, 8 aa, Artificial sequence
  an artificially synthesized sequence
TMGRSANP

SEQ ID NO: 525 - protein, 8 aa, Artificial sequence
  an artificially synthesized sequence
TPGRSANP

SEQ ID NO: 526 - protein, 8 aa, Artificial sequence
  an artificially synthesized sequence
TQGRSANP

SEQ ID NO: 527 - protein, 8 aa, Artificial sequence
  an artificially synthesized sequence
TVGRSANP

SEQ ID NO: 528 - protein, 8 aa, Artificial sequence
  an artificially synthesized sequence
TWGRSANP

SEQ ID NO: 529 - protein, 8 aa, Artificial sequence
  an artificially synthesized sequence
TSARSANP

SEQ ID NO: 530 - protein, 8 aa, Artificial sequence
  an artificially synthesized sequence
TSERSANP

SEQ ID NO: 531 - protein, 8 aa, Artificial sequence
  an artificially synthesized sequence
TSFRSANP

SEQ ID NO: 532 - protein, 8 aa, Artificial sequence
  an artificially synthesized sequence
TSHRSANP

SEQ ID NO: 533 - protein, 8 aa, Artificial sequence
  an artificially synthesized sequence
TSIRSANP

SEQ ID NO: 534 - protein, 8 aa, Artificial sequence
  an artificially synthesized sequence
TSKRSANP

SEQ ID NO: 535 - protein, 8 aa, Artificial sequence
  an artificially synthesized sequence
TSLRSANP

SEQ ID NO: 536 - protein, 8 aa, Artificial sequence
  an artificially synthesized sequence
TSMRSANP

SEQ ID NO: 537 - protein, 8 aa, Artificial sequence
  an artificially synthesized sequence
TSNRSANP

SEQ ID NO: 538 - protein, 8 aa, Artificial sequence
  an artificially synthesized sequence
TSPRSANP

SEQ ID NO: 539 - protein, 8 aa, Artificial sequence
  an artificially synthesized sequence
TSQRSANP

SEQ ID NO: 540 - protein, 8 aa, Artificial sequence
  an artificially synthesized sequence
TSRRSANP

SEQ ID NO: 541 - protein, 8 aa, Artificial sequence
  an artificially synthesized sequence
TSTRSANP

SEQ ID NO: 542 - protein, 8 aa, Artificial sequence
  an artificially synthesized sequence
TSVRSANP

SEQ ID NO: 543 - protein, 8 aa, Artificial sequence
  an artificially synthesized sequence
TSWRSANP

SEQ ID NO: 544 - protein, 8 aa, Artificial sequence
  an artificially synthesized sequence
TSYRSANP

SEQ ID NO: 545 - protein, 8 aa, Artificial sequence
  an artificially synthesized sequence
TSGRAANP

SEQ ID NO: 546 - protein, 8 aa, Artificial sequence
  an artificially synthesized sequence
TSGRDANP

SEQ ID NO: 547 - protein, 8 aa, Artificial sequence
  an artificially synthesized sequence
TSGREANP

SEQ ID NO: 548 - protein, 8 aa, Artificial sequence
  an artificially synthesized sequence
TSGRGANP

SEQ ID NO: 549 - protein, 8 aa, Artificial sequence
  an artificially synthesized sequence
TSGRHANP

SEQ ID NO: 550 - protein, 8 aa, Artificial sequence
  an artificially synthesized sequence
TSGRIANP

SEQ ID NO: 551 - protein, 8 aa, Artificial sequence
  an artificially synthesized sequence
TSGRKANP

SEQ ID NO: 552 - protein, 8 aa, Artificial sequence
  an artificially synthesized sequence
TSGRLANP

SEQ ID NO: 553 - protein, 8 aa, Artificial sequence
  an artificially synthesized sequence
TSGRMANP

SEQ ID NO: 554 - protein, 8 aa, Artificial sequence
  an artificially synthesized sequence
TSGRNANP

SEQ ID NO: 555 - protein, 8 aa, Artificial sequence
  an artificially synthesized sequence
TSGRPANP

SEQ ID NO: 556 - protein, 8 aa, Artificial sequence
  an artificially synthesized sequence
TSGRQANP

SEQ ID NO: 557 - protein, 8 aa, Artificial sequence
  an artificially synthesized sequence
TSGRRANP

SEQ ID NO: 558 - protein, 8 aa, Artificial sequence
  an artificially synthesized sequence
TSGRTANP

SEQ ID NO: 559 - protein, 8 aa, Artificial sequence
  an artificially synthesized sequence
TSGRVANP

SEQ ID NO: 560 - protein, 8 aa, Artificial sequence
  an artificially synthesized sequence
TSGRWANP

SEQ ID NO: 561 - protein, 8 aa, Artificial sequence
  an artificially synthesized sequence
TSGRYANP

SEQ ID NO: 562 - protein, 8 aa, Artificial sequence
  an artificially synthesized sequence
TSGRSENP

SEQ ID NO: 563 - protein, 8 aa, Artificial sequence
  an artificially synthesized sequence
TSGRSFNP

SEQ ID NO: 564 - protein, 8 aa, Artificial sequence
  an artificially synthesized sequence
TSGRSKNP

SEQ ID NO: 565 - protein, 8 aa, Artificial sequence
  an artificially synthesized sequence
TSGRSMNP

SEQ ID NO: 566 - protein, 8 aa, Artificial sequence
  an artificially synthesized sequence
TSGRSNNP

SEQ ID NO: 567 - protein, 8 aa, Artificial sequence
  an artificially synthesized sequence
TSGRSPNP

SEQ ID NO: 568 - protein, 8 aa, Artificial sequence
  an artificially synthesized sequence
TSGRSQNP

SEQ ID NO: 569 - protein, 8 aa, Artificial sequence
  an artificially synthesized sequence
TSGRSRNP

SEQ ID NO: 570 - protein, 8 aa, Artificial sequence
  an artificially synthesized sequence
TSGRSSNP

SEQ ID NO: 571 - protein, 8 aa, Artificial sequence
  an artificially synthesized sequence
TSGRSWNP

SEQ ID NO: 572 - protein, 8 aa, Artificial sequence
  an artificially synthesized sequence
TSGRSYNP

SEQ ID NO: 573 - protein, 8 aa, Artificial sequence
  an artificially synthesized sequence
TSGRSAAP

SEQ ID NO: 574 - protein, 8 aa, Artificial sequence
  an artificially synthesized sequence
TSGRSADP

SEQ ID NO: 575 - protein, 8 aa, Artificial sequence
  an artificially synthesized sequence
TSGRSAEP

SEQ ID NO: 576 - protein, 8 aa, Artificial sequence
  an artificially synthesized sequence
TSGRSAFP

SEQ ID NO: 577 - protein, 8 aa, Artificial sequence
  an artificially synthesized sequence
TSGRSAGP

SEQ ID NO: 578 - protein, 8 aa, Artificial sequence
  an artificially synthesized sequence
TSGRSAKP

SEQ ID NO: 579 - protein, 8 aa, Artificial sequence
  an artificially synthesized sequence
TSGRSALP

SEQ ID NO: 580 - protein, 8 aa, Artificial sequence
  an artificially synthesized sequence
TSGRSAMP

SEQ ID NO: 581 - protein, 8 aa, Artificial sequence
  an artificially synthesized sequence
TSGRSAPP

SEQ ID NO: 582 - protein, 8 aa, Artificial sequence
  an artificially synthesized sequence
TSGRSAQP

SEQ ID NO: 583 - protein, 8 aa, Artificial sequence
  an artificially synthesized sequence
TSGRSAVP

SEQ ID NO: 584 - protein, 8 aa, Artificial sequence
  an artificially synthesized sequence
TSGRSAWP

SEQ ID NO: 585 - protein, 8 aa, Artificial sequence
  an artificially synthesized sequence
TSGRSAYP

SEQ ID NO: 586 - protein, 8 aa, Artificial sequence
  an artificially synthesized sequence
TSGRSANA

SEQ ID NO: 587 - protein, 8 aa, Artificial sequence
  an artificially synthesized sequence
TSGRSAND

SEQ ID NO: 588 - protein, 8 aa, Artificial sequence
  an artificially synthesized sequence
TSGRSANE

SEQ ID NO: 589 - protein, 8 aa, Artificial sequence
  an artificially synthesized sequence
TSGRSANF

SEQ ID NO: 590 - protein, 8 aa, Artificial sequence
  an artificially synthesized sequence
TSGRSANG

SEQ ID NO: 591 - protein, 8 aa, Artificial sequence
  an artificially synthesized sequence
TSGRSANI

SEQ ID NO: 592 - protein, 8 aa, Artificial sequence
  an artificially synthesized sequence
TSGRSANK

SEQ ID NO: 593 - protein, 8 aa, Artificial sequence
  an artificially synthesized sequence
TSGRSANN

SEQ ID NO: 594 - protein, 8 aa, Artificial sequence
  an artificially synthesized sequence
TSGRSANQ

SEQ ID NO: 595 - protein, 8 aa, Artificial sequence
  an artificially synthesized sequence
TSGRSANS

SEQ ID NO: 596 - protein, 8 aa, Artificial sequence
  an artificially synthesized sequence
TSGRSANT

SEQ ID NO: 597 - protein, 8 aa, Artificial sequence
  an artificially synthesized sequence
TSGRSANW

SEQ ID NO: 598 - protein, 8 aa, Artificial sequence
  an artificially synthesized sequence
DSGRSANP

SEQ ID NO: 599 - protein, 8 aa, Artificial sequence
  an artificially synthesized sequence
ISGRSANP

SEQ ID NO: 600 - protein, 8 aa, Artificial sequence
  an artificially synthesized sequence
SSGRSANP

SEQ ID NO: 601 - protein, 8 aa, Artificial sequence
  an artificially synthesized sequence
THGRSANP

SEQ ID NO: 602 - protein, 8 aa, Artificial sequence
  an artificially synthesized sequence
TKGRSANP

SEQ ID NO: 603 - protein, 8 aa, Artificial sequence
  an artificially synthesized sequence
TTGRSANP

SEQ ID NO: 604 - protein, 8 aa, Artificial sequence
  an artificially synthesized sequence
TYGRSANP

SEQ ID NO: 605 - protein, 8 aa, Artificial sequence
  an artificially synthesized sequence
TSDRSANP

SEQ ID NO: 606 - protein, 8 aa, Artificial sequence
  an artificially synthesized sequence
TSSRSANP

SEQ ID NO: 607 - protein, 8 aa, Artificial sequence
  an artificially synthesized sequence
TSGRFANP

SEQ ID NO: 608 - protein, 8 aa, Artificial sequence
  an artificially synthesized sequence
TSGRSDNP

SEQ ID NO: 609 - protein, 8 aa, Artificial sequence
  an artificially synthesized sequence
TSGRSHNP

SEQ ID NO: 610 - protein, 8 aa, Artificial sequence
  an artificially synthesized sequence
TSGRSINP

SEQ ID NO: 611 - protein, 8 aa, Artificial sequence
  an artificially synthesized sequence
TSGRSLNP

SEQ ID NO: 612 - protein, 8 aa, Artificial sequence
  an artificially synthesized sequence
TSGRSTNP

SEQ ID NO: 613 - protein, 8 aa, Artificial sequence
  an artificially synthesized sequence
TSGRSVNP

SEQ ID NO: 614 - protein, 8 aa, Artificial sequence
  an artificially synthesized sequence
TSGRSAHP

SEQ ID NO: 615 - protein, 8 aa, Artificial sequence
  an artificially synthesized sequence
TSGRSAIP

SEQ ID NO: 616 - protein, 8 aa, Artificial sequence
  an artificially synthesized sequence
TSGRSARP

SEQ ID NO: 617 - protein, 8 aa, Artificial sequence
  an artificially synthesized sequence
TSGRSASP

SEQ ID NO: 618 - protein, 8 aa, Artificial sequence
  an artificially synthesized sequence
TSGRSATP

SEQ ID NO: 619 - protein, 8 aa, Artificial sequence
  an artificially synthesized sequence
TSGRSANH

SEQ ID NO: 620 - protein, 8 aa, Artificial sequence
  an artificially synthesized sequence
TSGRSANL

SEQ ID NO: 621 - protein, 8 aa, Artificial sequence
  an artificially synthesized sequence
TSGRSANM

SEQ ID NO: 622 - protein, 8 aa, Artificial sequence
  an artificially synthesized sequence
TSGRSANR

SEQ ID NO: 623 - protein, 8 aa, Artificial sequence
  an artificially synthesized sequence
TSGRSANV

SEQ ID NO: 624 - protein, 8 aa, Artificial sequence
  an artificially synthesized sequence
TSGRSANY

SEQ ID NO: 625 - protein, 8 aa, Artificial sequence
  an artificially synthesized sequence
GSGRSAVP

SEQ ID NO: 626 - protein, 8 aa, Artificial sequence
  an artificially synthesized sequence
GSGRSAYP

SEQ ID NO: 627 - protein, 8 aa, Artificial sequence
  an artificially synthesized sequence
GSGRSANQ

SEQ ID NO: 628 - protein, 8 aa, Artificial sequence
  an artificially synthesized sequence
GSGRSANA

SEQ ID NO: 629 - protein, 8 aa, Artificial sequence
  an artificially synthesized sequence
GSGRSANI

SEQ ID NO: 630 - protein, 8 aa, Artificial sequence
  an artificially synthesized sequence
GSGRSANF

SEQ ID NO: 631 - protein, 8 aa, Artificial sequence
  an artificially synthesized sequence
GSGRSANS

SEQ ID NO: 632 - protein, 8 aa, Artificial sequence
  an artificially synthesized sequence
QSGRSAVP

SEQ ID NO: 633 - protein, 8 aa, Artificial sequence
  an artificially synthesized sequence
QSGRSAYP

SEQ ID NO: 634 - protein, 8 aa, Artificial sequence
  an artificially synthesized sequence
QSGRSANQ

SEQ ID NO: 635 - protein, 8 aa, Artificial sequence
  an artificially synthesized sequence
QSGRSANA

SEQ ID NO: 636 - protein, 8 aa, Artificial sequence
  an artificially synthesized sequence
QSGRSANI

SEQ ID NO: 637 - protein, 8 aa, Artificial sequence
  an artificially synthesized sequence
QSGRSANF

SEQ ID NO: 638 - protein, 8 aa, Artificial sequence
  an artificially synthesized sequence
QSGRSANS

SEQ ID NO: 639 - protein, 8 aa, Artificial sequence
  an artificially synthesized sequence
PSGRSAVP

SEQ ID NO: 640 - protein, 8 aa, Artificial sequence
  an artificially synthesized sequence
PSGRSAYP

SEQ ID NO: 641 - protein, 8 aa, Artificial sequence
  an artificially synthesized sequence
PSGRSANQ

SEQ ID NO: 642 - protein, 8 aa, Artificial sequence
  an artificially synthesized sequence
PSGRSANA

SEQ ID NO: 643 - protein, 8 aa, Artificial sequence
  an artificially synthesized sequence
PSGRSANI

SEQ ID NO: 644 - protein, 8 aa, Artificial sequence
  an artificially synthesized sequence
PSGRSANF

SEQ ID NO: 645 - protein, 8 aa, Artificial sequence
  an artificially synthesized sequence
PSGRSANS

SEQ ID NO: 646 - protein, 8 aa, Artificial sequence
  an artificially synthesized sequence
ASGRSAVP

SEQ ID NO: 647 - protein, 8 aa, Artificial sequence
  an artificially synthesized sequence
ASGRSAYP

SEQ ID NO: 648 - protein, 8 aa, Artificial sequence
  an artificially synthesized sequence
ASGRSANQ

SEQ ID NO: 649 - protein, 8 aa, Artificial sequence
  an artificially synthesized sequence
ASGRSANA

SEQ ID NO: 650 - protein, 8 aa, Artificial sequence
  an artificially synthesized sequence
ASGRSANI

SEQ ID NO: 651 - protein, 8 aa, Artificial sequence
  an artificially synthesized sequence
ASGRSANF

SEQ ID NO: 652 - protein, 8 aa, Artificial sequence
  an artificially synthesized sequence
ASGRSANS

SEQ ID NO: 653 - protein, 8 aa, Artificial sequence
  an artificially synthesized sequence
YSGRSENP

SEQ ID NO: 654 - protein, 8 aa, Artificial sequence
  an artificially synthesized sequence
GSGRSENP

SEQ ID NO: 655 - protein, 8 aa, Artificial sequence
  an artificially synthesized sequence
QSGRSENP

SEQ ID NO: 656 - protein, 8 aa, Artificial sequence
  an artificially synthesized sequence
PSGRSENP

SEQ ID NO: 657 - protein, 8 aa, Artificial sequence
  an artificially synthesized sequence
ASGRSENP

SEQ ID NO: 658 - protein, 8 aa, Artificial sequence
  an artificially synthesized sequence
HSGRSENP

SEQ ID NO: 659 - protein, 8 aa, Artificial sequence
  an artificially synthesized sequence
TSGRSENQ

SEQ ID NO: 660 - protein, 8 aa, Artificial sequence
  an artificially synthesized sequence
TSGRSENA

SEQ ID NO: 661 - protein, 8 aa, Artificial sequence
  an artificially synthesized sequence
TSGRSENI

SEQ ID NO: 662 - protein, 8 aa, Artificial sequence
  an artificially synthesized sequence
TSGRSENF

SEQ ID NO: 663 - protein, 8 aa, Artificial sequence
  an artificially synthesized sequence
TSGRSENS

SEQ ID NO: 664 - protein, 8 aa, Artificial sequence
  an artificially synthesized sequence
YSGRSAEP

SEQ ID NO: 665 - protein, 8 aa, Artificial sequence
  an artificially synthesized sequence
GSGRSAEP

SEQ ID NO: 666 - protein, 8 aa, Artificial sequence
  an artificially synthesized sequence
QSGRSAEP

SEQ ID NO: 667 - protein, 8 aa, Artificial sequence
  an artificially synthesized sequence
PSGRSAEP

SEQ ID NO: 668 - protein, 8 aa, Artificial sequence
  an artificially synthesized sequence
ASGRSAEP

SEQ ID NO: 669 - protein, 8 aa, Artificial sequence
  an artificially synthesized sequence
HSGRSAEP

SEQ ID NO: 670 - protein, 8 aa, Artificial sequence
  an artificially synthesized sequence
TSGRSAEQ

SEQ ID NO: 671 - protein, 8 aa, Artificial sequence
  an artificially synthesized sequence
TSGRSAEA

SEQ ID NO: 672 - protein, 8 aa, Artificial sequence
  an artificially synthesized sequence
TSGRSAEI

SEQ ID NO: 673 - protein, 8 aa, Artificial sequence
  an artificially synthesized sequence
TSGRSAEF

SEQ ID NO: 674 - protein, 8 aa, Artificial sequence
  an artificially synthesized sequence
TSGRSAES

SEQ ID NO: 675 - protein, 8 aa, Artificial sequence
  an artificially synthesized sequence
GTGRSANP

SEQ ID NO: 676 - protein, 8 aa, Artificial sequence
  an artificially synthesized sequence
GKGRSANP

SEQ ID NO: 677 - protein, 8 aa, Artificial sequence
  an artificially synthesized sequence
GSGRSAIP

SEQ ID NO: 678 - protein, 8 aa, Artificial sequence
  an artificially synthesized sequence
GSGRSATP

SEQ ID NO: 679 - protein, 8 aa, Artificial sequence
  an artificially synthesized sequence
GSGRSASP

SEQ ID NO: 680 - protein, 8 aa, Artificial sequence
  an artificially synthesized sequence
GSGRSAHP

SEQ ID NO: 681 - protein, 8 aa, Artificial sequence
  an artificially synthesized sequence
GSGRSANY

SEQ ID NO: 682 - protein, 8 aa, Artificial sequence
  an artificially synthesized sequence
GSGRSANV

SEQ ID NO: 683 - protein, 8 aa, Artificial sequence
  an artificially synthesized sequence
GSGRSANH

SEQ ID NO: 684 - protein, 8 aa, Artificial sequence
  an artificially synthesized sequence
QTGRSANP

SEQ ID NO: 685 - protein, 8 aa, Artificial sequence
  an artificially synthesized sequence
QKGRSANP

SEQ ID NO: 686 - protein, 8 aa, Artificial sequence
  an artificially synthesized sequence
QSGRSAIP

SEQ ID NO: 687 - protein, 8 aa, Artificial sequence
  an artificially synthesized sequence
QSGRSATP

SEQ ID NO: 688 - protein, 8 aa, Artificial sequence
  an artificially synthesized sequence
QSGRSASP

SEQ ID NO: 689 - protein, 8 aa, Artificial sequence
  an artificially synthesized sequence
QSGRSAHP

SEQ ID NO: 690 - protein, 8 aa, Artificial sequence
  an artificially synthesized sequence
QSGRSANY

SEQ ID NO: 691 - protein, 8 aa, Artificial sequence
  an artificially synthesized sequence
QSGRSANV

SEQ ID NO: 692 - protein, 8 aa, Artificial sequence
  an artificially synthesized sequence
QSGRSANH

SEQ ID NO: 693 - protein, 8 aa, Artificial sequence
  an artificially synthesized sequence
PTGRSANP

SEQ ID NO: 694 - protein, 8 aa, Artificial sequence
  an artificially synthesized sequence
PKGRSANP

SEQ ID NO: 695 - protein, 8 aa, Artificial sequence
  an artificially synthesized sequence
PSGRSAIP

SEQ ID NO: 696 - protein, 8 aa, Artificial sequence
  an artificially synthesized sequence
PSGRSATP

SEQ ID NO: 697 - protein, 8 aa, Artificial sequence
  an artificially synthesized sequence
PSGRSASP

SEQ ID NO: 698 - protein, 8 aa, Artificial sequence
  an artificially synthesized sequence
PSGRSAHP

SEQ ID NO: 699 - protein, 8 aa, Artificial sequence
  an artificially synthesized sequence
PSGRSANY

SEQ ID NO: 700 - protein, 8 aa, Artificial sequence
  an artificially synthesized sequence
PSGRSANV

SEQ ID NO: 701 - protein, 8 aa, Artificial sequence
  an artificially synthesized sequence
PSGRSANH

SEQ ID NO: 702 - protein, 8 aa, Artificial sequence
  an artificially synthesized sequence
ATGRSANP

SEQ ID NO: 703 - protein, 8 aa, Artificial sequence
  an artificially synthesized sequence
AKGRSANP

SEQ ID NO: 704 - protein, 8 aa, Artificial sequence
  an artificially synthesized sequence
ASGRSAIP

SEQ ID NO: 705 - protein, 8 aa, Artificial sequence
  an artificially synthesized sequence
ASGRSATP

SEQ ID NO: 706 - protein, 8 aa, Artificial sequence
  an artificially synthesized sequence
ASGRSASP

SEQ ID NO: 707 - protein, 8 aa, Artificial sequence
  an artificially synthesized sequence
ASGRSAHP

SEQ ID NO: 708 - protein, 8 aa, Artificial sequence
  an artificially synthesized sequence
ASGRSANY

SEQ ID NO: 709 - protein, 8 aa, Artificial sequence
  an artificially synthesized sequence
ASGRSANV

SEQ ID NO: 710 - protein, 8 aa, Artificial sequence
  an artificially synthesized sequence
ASGRSANH

SEQ ID NO: 711 - protein, 8 aa, Artificial sequence
  an artificially synthesized sequence
YTGRSANP

SEQ ID NO: 712 - protein, 8 aa, Artificial sequence
  an artificially synthesized sequence
YKGRSANP

SEQ ID NO: 713 - protein, 8 aa, Artificial sequence
  an artificially synthesized sequence
YSGRSAVP

SEQ ID NO: 714 - protein, 8 aa, Artificial sequence
  an artificially synthesized sequence
YSGRSAIP

SEQ ID NO: 715 - protein, 8 aa, Artificial sequence
  an artificially synthesized sequence
YSGRSATP

SEQ ID NO: 716 - protein, 8 aa, Artificial sequence
  an artificially synthesized sequence
YSGRSASP

SEQ ID NO: 717 - protein, 8 aa, Artificial sequence
  an artificially synthesized sequence
YSGRSAHP

SEQ ID NO: 718 - protein, 8 aa, Artificial sequence
  an artificially synthesized sequence
YSGRSANA

SEQ ID NO: 719 - protein, 8 aa, Artificial sequence
  an artificially synthesized sequence
YSGRSANF

SEQ ID NO: 720 - protein, 8 aa, Artificial sequence
  an artificially synthesized sequence
YSGRSANY

SEQ ID NO: 721 - protein, 8 aa, Artificial sequence
  an artificially synthesized sequence
YSGRSANV

SEQ ID NO: 722 - protein, 8 aa, Artificial sequence
  an artificially synthesized sequence
YSGRSANH

SEQ ID NO: 723 - protein, 8 aa, Artificial sequence
  an artificially synthesized sequence
STGRSANP

SEQ ID NO: 724 - protein, 8 aa, Artificial sequence
  an artificially synthesized sequence
SKGRSANP

SEQ ID NO: 725 - protein, 8 aa, Artificial sequence
  an artificially synthesized sequence
SSGRSAVP

SEQ ID NO: 726 - protein, 8 aa, Artificial sequence
  an artificially synthesized sequence
SSGRSAIP

SEQ ID NO: 727 - protein, 8 aa, Artificial sequence
  an artificially synthesized sequence
SSGRSATP

SEQ ID NO: 728 - protein, 8 aa, Artificial sequence
  an artificially synthesized sequence
SSGRSASP

SEQ ID NO: 729 - protein, 8 aa, Artificial sequence
  an artificially synthesized sequence
SSGRSAHP

SEQ ID NO: 730 - protein, 8 aa, Artificial sequence
  an artificially synthesized sequence
SSGRSANA

SEQ ID NO: 731 - protein, 8 aa, Artificial sequence
  an artificially synthesized sequence
SSGRSANF

SEQ ID NO: 732 - protein, 8 aa, Artificial sequence
  an artificially synthesized sequence
SSGRSANY

SEQ ID NO: 733 - protein, 8 aa, Artificial sequence
  an artificially synthesized sequence
SSGRSANV

SEQ ID NO: 734 - protein, 8 aa, Artificial sequence
  an artificially synthesized sequence
SSGRSANH

SEQ ID NO: 735 - protein, 8 aa, Artificial sequence
  an artificially synthesized sequence
ITGRSANP

SEQ ID NO: 736 - protein, 8 aa, Artificial sequence
  an artificially synthesized sequence
IKGRSANP

SEQ ID NO: 737 - protein, 8 aa, Artificial sequence
  an artificially synthesized sequence
ISGRSAVP

SEQ ID NO: 738 - protein, 8 aa, Artificial sequence
  an artificially synthesized sequence
ISGRSAIP

SEQ ID NO: 739 - protein, 8 aa, Artificial sequence
  an artificially synthesized sequence
ISGRSATP

SEQ ID NO: 740 - protein, 8 aa, Artificial sequence
  an artificially synthesized sequence
ISGRSASP

SEQ ID NO: 741 - protein, 8 aa, Artificial sequence
  an artificially synthesized sequence
ISGRSAHP

SEQ ID NO: 742 - protein, 8 aa, Artificial sequence
  an artificially synthesized sequence
ISGRSANA

SEQ ID NO: 743 - protein, 8 aa, Artificial sequence
  an artificially synthesized sequence
ISGRSANF

SEQ ID NO: 744 - protein, 8 aa, Artificial sequence
  an artificially synthesized sequence
ISGRSANY

SEQ ID NO: 745 - protein, 8 aa, Artificial sequence
  an artificially synthesized sequence
ISGRSANV

SEQ ID NO: 746 - protein, 8 aa, Artificial sequence
  an artificially synthesized sequence
ISGRSANH

SEQ ID NO: 747 - protein, 8 aa, Artificial sequence
  an artificially synthesized sequence
TTGRSAVP

SEQ ID NO: 748 - protein, 8 aa, Artificial sequence
  an artificially synthesized sequence
TTGRSAIP

SEQ ID NO: 749 - protein, 8 aa, Artificial sequence
  an artificially synthesized sequence
TTGRSATP

SEQ ID NO: 750 - protein, 8 aa, Artificial sequence
  an artificially synthesized sequence
TTGRSASP

SEQ ID NO: 751 - protein, 8 aa, Artificial sequence
  an artificially synthesized sequence
TTGRSAHP

SEQ ID NO: 752 - protein, 8 aa, Artificial sequence
  an artificially synthesized sequence
TTGRSANA

SEQ ID NO: 753 - protein, 8 aa, Artificial sequence
  an artificially synthesized sequence
TTGRSANF

SEQ ID NO: 754 - protein, 8 aa, Artificial sequence
  an artificially synthesized sequence
TTGRSANY

SEQ ID NO: 755 - protein, 8 aa, Artificial sequence
  an artificially synthesized sequence
TTGRSANV

SEQ ID NO: 756 - protein, 8 aa, Artificial sequence
  an artificially synthesized sequence
TTGRSANH

SEQ ID NO: 757 - protein, 8 aa, Artificial sequence
  an artificially synthesized sequence
TKGRSAVP

SEQ ID NO: 758 - protein, 8 aa, Artificial sequence
  an artificially synthesized sequence
TKGRSAIP

SEQ ID NO: 759 - protein, 8 aa, Artificial sequence
  an artificially synthesized sequence
TKGRSATP

SEQ ID NO: 760 - protein, 8 aa, Artificial sequence
  an artificially synthesized sequence
TKGRSASP

SEQ ID NO: 761 - protein, 8 aa, Artificial sequence
  an artificially synthesized sequence
TKGRSAHP

SEQ ID NO: 762 - protein, 8 aa, Artificial sequence
  an artificially synthesized sequence
TKGRSANA

SEQ ID NO: 763 - protein, 8 aa, Artificial sequence
  an artificially synthesized sequence
TKGRSANF

SEQ ID NO: 764 - protein, 8 aa, Artificial sequence
  an artificially synthesized sequence
TKGRSANY

SEQ ID NO: 765 - protein, 8 aa, Artificial sequence
  an artificially synthesized sequence
TKGRSANV

SEQ ID NO: 766 - protein, 8 aa, Artificial sequence
  an artificially synthesized sequence
TKGRSANH

SEQ ID NO: 767 - protein, 8 aa, Artificial sequence
  an artificially synthesized sequence
TSGRSAVY

SEQ ID NO: 768 - protein, 8 aa, Artificial sequence
  an artificially synthesized sequence
TSGRSAVV

SEQ ID NO: 769 - protein, 8 aa, Artificial sequence
  an artificially synthesized sequence
TSGRSAVH

SEQ ID NO: 770 - protein, 8 aa, Artificial sequence
  an artificially synthesized sequence
TSGRSAIY

SEQ ID NO: 771 - protein, 8 aa, Artificial sequence
  an artificially synthesized sequence
TSGRSAIV

SEQ ID NO: 772 - protein, 8 aa, Artificial sequence
  an artificially synthesized sequence
TSGRSAIH

SEQ ID NO: 773 - protein, 8 aa, Artificial sequence
  an artificially synthesized sequence
TSGRSASY

SEQ ID NO: 774 - protein, 8 aa, Artificial sequence
  an artificially synthesized sequence
TSGRSASV

SEQ ID NO: 775 - protein, 8 aa, Artificial sequence
  an artificially synthesized sequence
TSGRSASH

SEQ ID NO: 776 - protein, 8 aa, Artificial sequence
  an artificially synthesized sequence
TSGRSAHY

SEQ ID NO: 777 - protein, 8 aa, Artificial sequence
  an artificially synthesized sequence
TSGRSAHV

SEQ ID NO: 778 - protein, 8 aa, Artificial sequence
  an artificially synthesized sequence
TSGRSAHH

SEQ ID NO: 779 - protein, 8 aa, Artificial sequence
  an artificially synthesized sequence
PSGRSEVP

SEQ ID NO: 780 - protein, 8 aa, Artificial sequence
  an artificially synthesized sequence
PSGRSAEP

SEQ ID NO: 781 - protein, 8 aa, Artificial sequence
  an artificially synthesized sequence
PSGRSAGP

SEQ ID NO: 782 - protein, 8 aa, Artificial sequence
  an artificially synthesized sequence
ASGRSENA

SEQ ID NO: 783 - protein, 8 aa, Artificial sequence
  an artificially synthesized sequence
ASGRSAEA

SEQ ID NO: 784 - protein, 8 aa, Artificial sequence
  an artificially synthesized sequence
ASGRSAGA

SEQ ID NO: 785 - protein, 8 aa, Artificial sequence
  an artificially synthesized sequence
GTGRSATP

SEQ ID NO: 786 - protein, 8 aa, Artificial sequence
  an artificially synthesized sequence
GSGRSATY

SEQ ID NO: 787 - protein, 8 aa, Artificial sequence
  an artificially synthesized sequence
GSGRSATV

SEQ ID NO: 788 - protein, 8 aa, Artificial sequence
  an artificially synthesized sequence
GSGRSATH

SEQ ID NO: 789 - protein, 8 aa, Artificial sequence
  an artificially synthesized sequence
GTGRSATY

SEQ ID NO: 790 - protein, 8 aa, Artificial sequence
  an artificially synthesized sequence
GTGRSATV

SEQ ID NO: 791 - protein, 8 aa, Artificial sequence
  an artificially synthesized sequence
GTGRSATH

SEQ ID NO: 792 - protein, 8 aa, Artificial sequence
  an artificially synthesized sequence
GSGRSETP

SEQ ID NO: 793 - protein, 8 aa, Artificial sequence
  an artificially synthesized sequence
GTGRSETP

SEQ ID NO: 794 - protein, 8 aa, Artificial sequence
  an artificially synthesized sequence
GSGRSETY

SEQ ID NO: 795 - protein, 8 aa, Artificial sequence
  an artificially synthesized sequence
GSGRSETV

SEQ ID NO: 796 - protein, 8 aa, Artificial sequence
  an artificially synthesized sequence
GSGRSETH

SEQ ID NO: 797 - protein, 8 aa, Artificial sequence
  an artificially synthesized sequence
YTGRSAVP

SEQ ID NO: 798 - protein, 8 aa, Artificial sequence
  an artificially synthesized sequence
YSGRSAVY

SEQ ID NO: 799 - protein, 8 aa, Artificial sequence
  an artificially synthesized sequence
YSGRSAVV

SEQ ID NO: 800 - protein, 8 aa, Artificial sequence
  an artificially synthesized sequence
YSGRSAVH

SEQ ID NO: 801 - protein, 8 aa, Artificial sequence
  an artificially synthesized sequence
YTGRSAVY

SEQ ID NO: 802 - protein, 8 aa, Artificial sequence
  an artificially synthesized sequence
YTGRSAVV

SEQ ID NO: 803 - protein, 8 aa, Artificial sequence
  an artificially synthesized sequence
YTGRSAVH

SEQ ID NO: 804 - protein, 8 aa, Artificial sequence
  an artificially synthesized sequence
YSGRSEVP

SEQ ID NO: 805 - protein, 8 aa, Artificial sequence
  an artificially synthesized sequence
YTGRSEVP

SEQ ID NO: 806 - protein, 8 aa, Artificial sequence
  an artificially synthesized sequence
YSGRSEVY

SEQ ID NO: 807 - protein, 8 aa, Artificial sequence
  an artificially synthesized sequence
YSGRSEVV

SEQ ID NO: 808 - protein, 8 aa, Artificial sequence
  an artificially synthesized sequence
YSGRSEVH

SEQ ID NO: 809 - protein, 8 aa, Artificial sequence
  an artificially synthesized sequence
YTGRSAVP

SEQ ID NO: 810 - protein, 8 aa, Artificial sequence
  an artificially synthesized sequence
YSGRSAVY

SEQ ID NO: 811 - protein, 8 aa, Artificial sequence
  an artificially synthesized sequence
YSGRSAVV

SEQ ID NO: 812 - protein, 8 aa, Artificial sequence
  an artificially synthesized sequence
YSGRSAVH

SEQ ID NO: 813 - protein, 8 aa, Artificial sequence
  an artificially synthesized sequence
YTGRSAVY

SEQ ID NO: 814 - protein, 8 aa, Artificial sequence
  an artificially synthesized sequence
YTGRSAVV

SEQ ID NO: 815 - protein, 8 aa, Artificial sequence
  an artificially synthesized sequence
YTGRSAVH

SEQ ID NO: 816 - protein, 228 aa, Artificial sequence
  an artificially synthesized sequence
QSVLTQPPSASGTPGQRVTISCSGSSSNIGSNTVNWYQRLPGAAPQLLIYNNDQRPSGIPDRFSGSKSGTSGSLVISGLQSEDEADYYCASWDDSLNGRVFGGGTKLTVLTSTSGRSANPRGGQPKAAPSVTLFPPSSEELQANKATLVCLISDFYPGAVTVAWKADSSPVKAGVETTTPSKQSNNKYAASSYLSLTPEQWKSHRSYSCQVTHEGSTVEKTVAPTECS

SEQ ID NO: 817 - protein, 228 aa, Artificial sequence
  an artificially synthesized sequence
QSVLTQPPSASGTPGQRVTISCSGSSSNIGSNTVNWYQRLPGAAPQLLIYNNDQRPSGIPDRFSGSKSGTSGSLVISGLQSEDEADYYCASWDDSLNGRVFGGGTKLTVLTSYTGRSAVPRGGQPKAAPSVTLFPPSSEELQANKATLVCLISDFYPGAVTVAWKADSSPVKAGVETTTPSKQSNNKYAASSYLSLTPEQWKSHRSYSCQVTHEGSTVEKTVAPTECS

SEQ ID NO: 818 - protein, 228 aa, Artificial sequence
  an artificially synthesized sequence
QSVLTQPPSASGTPGQRVTISCSGSSSNIGSNTVNWYQRLPGAAPQLLIYNNDQRPSGIPDRFSGSKSGTSGSLVISGLQSEDEADYYCASWDDSLNGRVFGGGTKLTVLTSYSGRSAVYRGGQPKAAPSVTLFPPSSEELQANKATLVCLISDFYPGAVTVAWKADSSPVKAGVETTTPSKQSNNKYAASSYLSLTPEQWKSHRSYSCQVTHEGSTVEKTVAPTECS

SEQ ID NO: 819 - protein, 228 aa, Artificial sequence
  an artificially synthesized sequence
QSVLTQPPSASGTPGQRVTISCSGSSSNIGSNTVNWYQRLPGAAPQLLIYNNDQRPSGIPDRFSGSKSGTSGSLVISGLQSEDEADYYCASWDDSLNGRVFGGGTKLTVLTSYSGRSAVVRGGQPKAAPSVTLFPPSSEELQANKATLVCLISDFYPGAVTVAWKADSSPVKAGVETTTPSKQSNNKYAASSYLSLTPEQWKSHRSYSCQVTHEGSTVEKTVAPTECS

SEQ ID NO: 820 - protein, 228 aa, Artificial sequence
  an artificially synthesized sequence
QSVLTQPPSASGTPGQRVTISCSGSSSNIGSNTVNWYQRLPGAAPQLLIYNNDQRPSGIPDRFSGSKSGTSGSLVISGLQSEDEADYYCASWDDSLNGRVFGGGTKLTVLTSYSGRSAVHRGGQPKAAPSVTLFPPSSEELQANKATLVCLISDFYPGAVTVAWKADSSPVKAGVETTTPSKQSNNKYAASSYLSLTPEQWKSHRSYSCQVTHEGSTVEKTVAPTECS

SEQ ID NO: 821 - protein, 228 aa, Artificial sequence
  an artificially synthesized sequence
QSVLTQPPSASGTPGQRVTISCSGSSSNIGSNTVNWYQRLPGAAPQLLIYNNDQRPSGIPDRFSGSKSGTSGSLVISGLQSEDEADYYCASWDDSLNGRVFGGGTKLTVLTSYTGRSAVYRGGQPKAAPSVTLFPPSSEELQANKATLVCLISDFYPGAVTVAWKADSSPVKAGVETTTPSKQSNNKYAASSYLSLTPEQWKSHRSYSCQVTHEGSTVEKTVAPTECS

SEQ ID NO: 822 - protein, 228 aa, Artificial sequence
  an artificially synthesized sequence
QSVLTQPPSASGTPGQRVTISCSGSSSNIGSNTVNWYQRLPGAAPQLLIYNNDQRPSGIPDRFSGSKSGTSGSLVISGLQSEDEADYYCASWDDSLNGRVFGGGTKLTVLTSYTGRSAVVRGGQPKAAPSVTLFPPSSEELQANKATLVCLISDFYPGAVTVAWKADSSPVKAGVETTTPSKQSNNKYAASSYLSLTPEQWKSHRSYSCQVTHEGSTVEKTVAPTECS

SEQ ID NO: 823 - protein, 228 aa, Artificial sequence
  an artificially synthesized sequence
QSVLTQPPSASGTPGQRVTISCSGSSSNIGSNTVNWYQRLPGAAPQLLIYNNDQRPSGIPDRFSGSKSGTSGSLVISGLQSEDEADYYCASWDDSLNGRVFGGGTKLTVLTSYTGRSAVHRGGQPKAAPSVTLFPPSSEELQANKATLVCLISDFYPGAVTVAWKADSSPVKAGVETTTPSKQSNNKYAASSYLSLTPEQWKSHRSYSCQVTHEGSTVEKTVAPTECS

SEQ ID NO: 824 - protein, 228 aa, Artificial sequence
  an artificially synthesized sequence
QSVLTQPPSASGTPGQRVTISCSGSSSNIGSNTVNWYQRLPGAAPQLLIYNNDQRPSGIPDRFSGSKSGTSGSLVISGLQSEDEADYYCASWDDSLNGRVFGGGTKLTVLTSYTGRSAVPGGGQPKAAPSVTLFPPSSEELQANKATLVCLISDFYPGAVTVAWKADSSPVKAGVETTTPSKQSNNKYAASSYLSLTPEQWKSHRSYSCQVTHEGSTVEKTVAPTECS

SEQ ID NO: 825 - protein, 228 aa, Artificial sequence
  an artificially synthesized sequence
QSVLTQPPSASGTPGQRVTISCSGSSSNIGSNTVNWYQRLPGAAPQLLIYNNDQRPSGIPDRFSGSKSGTSGSLVISGLQSEDEADYYCASWDDSLNGRVFGGGTKLTVLTSYSGRSAVYGGGQPKAAPSVTLFPPSSEELQANKATLVCLISDFYPGAVTVAWKADSSPVKAGVETTTPSKQSNNKYAASSYLSLTPEQWKSHRSYSCQVTHEGSTVEKTVAPTECS

SEQ ID NO: 826 - protein, 228 aa, Artificial sequence
  an artificially synthesized sequence
QSVLTQPPSASGTPGQRVTISCSGSSSNIGSNTVNWYQRLPGAAPQLLIYNNDQRPSGIPDRFSGSKSGTSGSLVISGLQSEDEADYYCASWDDSLNGRVFGGGTKLTVLTSYSGRSAVVGGGQPKAAPSVTLFPPSSEELQANKATLVCLISDFYPGAVTVAWKADSSPVKAGVETTTPSKQSNNKYAASSYLSLTPEQWKSHRSYSCQVTHEGSTVEKTVAPTECS

SEQ ID NO: 827 - protein, 228 aa, Artificial sequence
  an artificially synthesized sequence
QSVLTQPPSASGTPGQRVTISCSGSSSNIGSNTVNWYQRLPGAAPQLLIYNNDQRPSGIPDRFSGSKSGTSGSLVISGLQSEDEADYYCASWDDSLNGRVFGGGTKLTVLTSYSGRSAVHGGGQPKAAPSVTLFPPSSEELQANKATLVCLISDFYPGAVTVAWKADSSPVKAGVETTTPSKQSNNKYAASSYLSLTPEQWKSHRSYSCQVTHEGSTVEKTVAPTECS

SEQ ID NO: 828 - protein, 228 aa, Artificial sequence
  an artificially synthesized sequence
QSVLTQPPSASGTPGQRVTISCSGSSSNIGSNTVNWYQRLPGAAPQLLIYNNDQRPSGIPDRFSGSKSGTSGSLVISGLQSEDEADYYCASWDDSLNGRVFGGGTKLTVLTSYTGRSAVYGGGQPKAAPSVTLFPPSSEELQANKATLVCLISDFYPGAVTVAWKADSSPVKAGVETTTPSKQSNNKYAASSYLSLTPEQWKSHRSYSCQVTHEGSTVEKTVAPTECS

SEQ ID NO: 829 - protein, 228 aa, Artificial sequence
  an artificially synthesized sequence
QSVLTQPPSASGTPGQRVTISCSGSSSNIGSNTVNWYQRLPGAAPQLLIYNNDQRPSGIPDRFSGSKSGTSGSLVISGLQSEDEADYYCASWDDSLNGRVFGGGTKLTVLTSYTGRSAVVGGGQPKAAPSVTLFPPSSEELQANKATLVCLISDFYPGAVTVAWKADSSPVKAGVETTTPSKQSNNKYAASSYLSLTPEQWKSHRSYSCQVTHEGSTVEKTVAPTECS

SEQ ID NO: 830 - protein, 228 aa, Artificial sequence
  an artificially synthesized sequence
QSVLTQPPSASGTPGQRVTISCSGSSSNIGSNTVNWYQRLPGAAPQLLIYNNDQRPSGIPDRFSGSKSGTSGSLVISGLQSEDEADYYCASWDDSLNGRVFGGGTKLTVLTSYTGRSAVHGGGQPKAAPSVTLFPPSSEELQANKATLVCLISDFYPGAVTVAWKADSSPVKAGVETTTPSKQSNNKYAASSYLSLTPEQWKSHRSYSCQVTHEGSTVEKTVAPTECS

SEQ ID NO: 831 - protein, 462 aa, Artificial sequence
  an artificially synthesized sequence
QVQLVQSGAEVKKPGSSVTVSCKASGGTFSSFSITWLRQAPGQGLEWMGEITPMFGIANYAQKFQGRVTISADESTSTAYMELSGLTSEDTAMYYCARDGRFDVSDLLTDKPKVTINYNGMDVWGQGTLVTVSSASTKGPSVFPLAPSSKSTSGGTAALGCLVKDYFPEPVTVSWNSGALTSGVHTFPAVLQSSGLYSLSSVVTVPSSSLGTQTYICNVNHKPSNTKVDKRVEPKSCDKTHTCPPCPAPELRRGPSVFLFPPKPKDTLMISRTPEVTCVVVDVSHEDPEVKFNWYVDGVEVHNAKTKPREEQYNSTYRVVSVLTVLHQDWLNGKEYKCKVSNKGLPSSIEKTISKAKGQPREPQVYTLPPSREEMTKNQVSLTCLVKGFYPSDIAVEWESNGQPENNYKTTPPVLDSDGSFFLYSKLTVDKSRWQEGNVFSCSVMHEALHNHYTQKSLSLSP

SEQ ID NO: 832 - protein, 216 aa, Artificial sequence
  an artificially synthesized sequence
QSVLTQPPSASGTPGQRVTISCSGSSSNIGSNTVNWYQRLPGAAPQLLIYNNDQRPSGIPDRFSGSKSGTSGSLVISGLQSEDEADYYCASWDDSLNGRVFGGGTKLTVLGQPKAAPSVTLFPPSSEELQANKATLVCLISDFYPGAVTVAWKADSSPVKAGVETTTPSKQSNNKYAASSYLSLTPEQWKSHRSYSCQVTHEGSTVEKTVAPTECS

SEQ ID NO: 833-852 - skipped (20 entries)

SEQ ID NO: 853 - protein, 12 aa, Artificial sequence
  an artificially synthesized sequence
TSTSGRSANPRG

SEQ ID NO: 854 - protein, 12 aa, Artificial sequence
  an artificially synthesized sequence
TSTSGRSANPAG

SEQ ID NO: 855 - protein, 12 aa, Artificial sequence
  an artificially synthesized sequence
TSTSGRSANPHG

SEQ ID NO: 856 - protein, 12 aa, Artificial sequence
  an artificially synthesized sequence
TSTSGRSANPIG

SEQ ID NO: 857 - protein, 12 aa, Artificial sequence
  an artificially synthesized sequence
TSTSGRSANPLG

SEQ ID NO: 858 - protein, 12 aa, Artificial sequence
  an artificially synthesized sequence
TSTSGRSANPSG

SEQ ID NO: 859 - protein, 12 aa, Artificial sequence
  an artificially synthesized sequence
ISTSGRSANPIG

SEQ ID NO: 860 - protein, 12 aa, Artificial sequence
  an artificially synthesized sequence
YSTSGRSANPIG

SEQ ID NO: 861 - protein, 12 aa, Artificial sequence
  an artificially synthesized sequence
TSYSGRSAVPAG

SEQ ID NO: 862 - protein, 12 aa, Artificial sequence
  an artificially synthesized sequence
TSPSGRSANIAG

SEQ ID NO: 863 - protein, 12 aa, Artificial sequence
  an artificially synthesized sequence
TSPSGRSANFAG

SEQ ID NO: 864 - protein, 12 aa, Artificial sequence
  an artificially synthesized sequence
TSPTGRSANPAG

SEQ ID NO: 865 - protein, 12 aa, Artificial sequence
  an artificially synthesized sequence
TSPSGRSAIPAG

SEQ ID NO: 866 - protein, 12 aa, Artificial sequence
  an artificially synthesized sequence
TSYTGRSANPAG

SEQ ID NO: 867 - protein, 12 aa, Artificial sequence
  an artificially synthesized sequence
TSYSGRSAIPAG

SEQ ID NO: 868 - protein, 12 aa, Artificial sequence
  an artificially synthesized sequence
TSISGRSANYAG

SEQ ID NO: 869 - protein, 12 aa, Artificial sequence
  an artificially synthesized sequence
TSPSGRSAGPAG

SEQ ID NO: 870 - protein, 12 aa, Artificial sequence
  an artificially synthesized sequence
TSYTGRSAVPAG

SEQ ID NO: 871 - protein, 12 aa, Artificial sequence
  an artificially synthesized sequence
TSYTGRSAVYAG

SEQ ID NO: 872 - protein, 12 aa, Artificial sequence
  an artificially synthesized sequence
TSYTGRSAVVAG

SEQ ID NO: 873 - protein, 12 aa, Artificial sequence
  an artificially synthesized sequence
TSYTGRSAVHAG

SEQ ID NO: 874 - protein, 12 aa, Artificial sequence
  an artificially synthesized sequence
TSYSGRSAVPHG

SEQ ID NO: 875 - protein, 12 aa, Artificial sequence
  an artificially synthesized sequence
TSPSGRSANIHG

SEQ ID NO: 876 - protein, 12 aa, Artificial sequence
  an artificially synthesized sequence
TSPSGRSANFHG

SEQ ID NO: 877 - protein, 12 aa, Artificial sequence
  an artificially synthesized sequence
TSPTGRSANPHG

SEQ ID NO: 878 - protein, 12 aa, Artificial sequence
  an artificially synthesized sequence
TSPSGRSAIPHG

SEQ ID NO: 879 - protein, 12 aa, Artificial sequence
  an artificially synthesized sequence
TSYTGRSANPHG

SEQ ID NO: 880 - protein, 12 aa, Artificial sequence
  an artificially synthesized sequence
TSYSGRSAIPHG

SEQ ID NO: 881 - protein, 12 aa, Artificial sequence
  an artificially synthesized sequence
TSISGRSANYHG

SEQ ID NO: 882 - protein, 12 aa, Artificial sequence
  an artificially synthesized sequence
TSPSGRSAGPHG

SEQ ID NO: 883 - protein, 12 aa, Artificial sequence
  an artificially synthesized sequence
TSYTGRSAVPHG

SEQ ID NO: 884 - protein, 12 aa, Artificial sequence
  an artificially synthesized sequence
TSYTGRSAVYHG

SEQ ID NO: 885 - protein, 12 aa, Artificial sequence
  an artificially synthesized sequence
TSYTGRSAVVHG

SEQ ID NO: 886 - protein, 12 aa, Artificial sequence
  an artificially synthesized sequence
TSYTGRSAVHHG

SEQ ID NO: 887 - protein, 12 aa, Artificial sequence
  an artificially synthesized sequence
TSYSGRSAVPIG

SEQ ID NO: 888 - protein, 12 aa, Artificial sequence
  an artificially synthesized sequence
TSPSGRSANIIG

SEQ ID NO: 889 - protein, 12 aa, Artificial sequence
  an artificially synthesized sequence
TSPSGRSANFIG

SEQ ID NO: 890 - protein, 12 aa, Artificial sequence
  an artificially synthesized sequence
TSPTGRSANPIG

SEQ ID NO: 891 - protein, 12 aa, Artificial sequence
  an artificially synthesized sequence
TSPSGRSAIPIG

SEQ ID NO: 892 - protein, 12 aa, Artificial sequence
  an artificially synthesized sequence
TSYTGRSANPIG

SEQ ID NO: 893 - protein, 12 aa, Artificial sequence
  an artificially synthesized sequence
TSYSGRSAIPIG

SEQ ID NO: 894 - protein, 12 aa, Artificial sequence
  an artificially synthesized sequence
TSISGRSANYIG

SEQ ID NO: 895 - protein, 12 aa, Artificial sequence
  an artificially synthesized sequence
TSPSGRSAGPIG

SEQ ID NO: 896 - protein, 12 aa, Artificial sequence
  an artificially synthesized sequence
TSYTGRSAVPIG

SEQ ID NO: 897 - protein, 12 aa, Artificial sequence
  an artificially synthesized sequence
TSYTGRSAVYIG

SEQ ID NO: 898 - protein, 12 aa, Artificial sequence
  an artificially synthesized sequence
TSYTGRSAVVIG

SEQ ID NO: 899 - protein, 12 aa, Artificial sequence
  an artificially synthesized sequence
TSYTGRSAVHIG

SEQ ID NO: 900 - protein, 12 aa, Artificial sequence
  an artificially synthesized sequence
TSYSGRSAVPLG

SEQ ID NO: 901 - protein, 12 aa, Artificial sequence
  an artificially synthesized sequence
TSPSGRSANILG

SEQ ID NO: 902 - protein, 12 aa, Artificial sequence
  an artificially synthesized sequence
TSPSGRSANFLG

SEQ ID NO: 903 - protein, 12 aa, Artificial sequence
  an artificially synthesized sequence
TSPTGRSANPLG

SEQ ID NO: 904 - protein, 12 aa, Artificial sequence
  an artificially synthesized sequence
TSPSGRSAIPLG

SEQ ID NO: 905 - protein, 12 aa, Artificial sequence
  an artificially synthesized sequence
TSYTGRSANPLG

SEQ ID NO: 906 - protein, 12 aa, Artificial sequence
  an artificially synthesized sequence
TSYSGRSAIPLG

SEQ ID NO: 907 - protein, 12 aa, Artificial sequence
  an artificially synthesized sequence
TSISGRSANYLG

SEQ ID NO: 908 - protein, 12 aa, Artificial sequence
  an artificially synthesized sequence
TSPSGRSAGPLG

SEQ ID NO: 909 - protein, 12 aa, Artificial sequence
  an artificially synthesized sequence
TSYTGRSAVPLG

SEQ ID NO: 910 - protein, 12 aa, Artificial sequence
  an artificially synthesized sequence
TSYTGRSAVYLG

SEQ ID NO: 911 - protein, 12 aa, Artificial sequence
  an artificially synthesized sequence
TSYTGRSAVVLG

SEQ ID NO: 912 - protein, 12 aa, Artificial sequence
  an artificially synthesized sequence
TSYTGRSAVHLG

SEQ ID NO: 913 - protein, 12 aa, Artificial sequence
  an artificially synthesized sequence
TSYSGRSAVPSG

SEQ ID NO: 914 - protein, 12 aa, Artificial sequence
  an artificially synthesized sequence
TSPSGRSANISG

SEQ ID NO: 915 - protein, 12 aa, Artificial sequence
  an artificially synthesized sequence
TSPSGRSANFSG

SEQ ID NO: 916 - protein, 12 aa, Artificial sequence
  an artificially synthesized sequence
TSPTGRSANPSG

SEQ ID NO: 917 - protein, 12 aa, Artificial sequence
  an artificially synthesized sequence
TSPSGRSAIPSG

SEQ ID NO: 918 - protein, 12 aa, Artificial sequence
  an artificially synthesized sequence
TSYTGRSANPSG

SEQ ID NO: 919 - protein, 12 aa, Artificial sequence
  an artificially synthesized sequence
TSYSGRSAIPSG

SEQ ID NO: 920 - protein, 12 aa, Artificial sequence
  an artificially synthesized sequence
TSISGRSANYSG

SEQ ID NO: 921 - protein, 12 aa, Artificial sequence
  an artificially synthesized sequence
TSPSGRSAGPSG

SEQ ID NO: 922 - protein, 12 aa, Artificial sequence
  an artificially synthesized sequence
TSYTGRSAVPSG

SEQ ID NO: 923 - protein, 12 aa, Artificial sequence
  an artificially synthesized sequence
TSYTGRSAVYSG

SEQ ID NO: 924 - protein, 12 aa, Artificial sequence
  an artificially synthesized sequence
TSYTGRSAVVSG

SEQ ID NO: 925 - protein, 12 aa, Artificial sequence
  an artificially synthesized sequence
TSYTGRSAVHSG

SEQ ID NO: 926 - protein, 12 aa, Artificial sequence
  an artificially synthesized sequence
ISYSGRSAVPIG

SEQ ID NO: 927 - protein, 12 aa, Artificial sequence
  an artificially synthesized sequence
ISPSGRSANIIG

SEQ ID NO: 928 - protein, 12 aa, Artificial sequence
  an artificially synthesized sequence
ISPSGRSANFIG

SEQ ID NO: 929 - protein, 12 aa, Artificial sequence
  an artificially synthesized sequence
ISPTGRSANPIG

SEQ ID NO: 930 - protein, 12 aa, Artificial sequence
  an artificially synthesized sequence
ISPSGRSAIPIG

SEQ ID NO: 931 - protein, 12 aa, Artificial sequence
  an artificially synthesized sequence
ISYTGRSANPIG

SEQ ID NO: 932 - protein, 12 aa, Artificial sequence
  an artificially synthesized sequence
ISYSGRSAIPIG

SEQ ID NO: 933 - protein, 12 aa, Artificial sequence
  an artificially synthesized sequence
ISISGRSANYIG

SEQ ID NO: 934 - protein, 12 aa, Artificial sequence
  an artificially synthesized sequence
ISPSGRSAGPIG

SEQ ID NO: 935 - protein, 12 aa, Artificial sequence
  an artificially synthesized sequence
ISYTGRSAVPIG

SEQ ID NO: 936 - protein, 12 aa, Artificial sequence
  an artificially synthesized sequence
ISYTGRSAVYIG

SEQ ID NO: 937 - protein, 12 aa, Artificial sequence
  an artificially synthesized sequence
ISYTGRSAVVIG

SEQ ID NO: 938 - protein, 12 aa, Artificial sequence
  an artificially synthesized sequence
ISYTGRSAVHIG

SEQ ID NO: 939 - protein, 12 aa, Artificial sequence
  an artificially synthesized sequence
YSYSGRSAVPIG

SEQ ID NO: 940 - protein, 12 aa, Artificial sequence
  an artificially synthesized sequence
YSPSGRSANIIG

SEQ ID NO: 941 - protein, 12 aa, Artificial sequence
  an artificially synthesized sequence
YSPSGRSANFIG

SEQ ID NO: 942 - protein, 12 aa, Artificial sequence
  an artificially synthesized sequence
YSPTGRSANPIG

SEQ ID NO: 943 - protein, 12 aa, Artificial sequence
  an artificially synthesized sequence
YSPSGRSAIPIG

SEQ ID NO: 944 - protein, 12 aa, Artificial sequence
  an artificially synthesized sequence
YSYTGRSANPIG

SEQ ID NO: 945 - protein, 12 aa, Artificial sequence
  an artificially synthesized sequence
YSYSGRSAIPIG

SEQ ID NO: 946 - protein, 12 aa, Artificial sequence
  an artificially synthesized sequence
YSISGRSANYIG

SEQ ID NO: 947 - protein, 12 aa, Artificial sequence
  an artificially synthesized sequence
YSPSGRSAGPIG

SEQ ID NO: 948 - protein, 12 aa, Artificial sequence
  an artificially synthesized sequence
YSYTGRSAVPIG

SEQ ID NO: 949 - protein, 12 aa, Artificial sequence
  an artificially synthesized sequence
YSYTGRSAVYIG

SEQ ID NO: 950 - protein, 12 aa, Artificial sequence
  an artificially synthesized sequence
YSYTGRSAVVIG

SEQ ID NO: 951 - protein, 12 aa, Artificial sequence
  an artificially synthesized sequence
YSYTGRSAVHIG

SEQ ID NO: 952 - protein, 228 aa, Artificial sequence; identical to SEQ ID NO: 816
  an artificially synthesized sequence

SEQ ID NO: 953 - protein, 228 aa, Artificial sequence
  an artificially synthesized sequence
QSVLTQPPSASGTPGQRVTISCSGSSSNIGSNTVNWYQRLPGAAPQLLIYNNDQRPSGIPDRFSGSKSGTSGSLVISGLQSEDEADYYCASWDDSLNGRVFGGGTKLTVLTSTSGRSANPAGGQPKAAPSVTLFPPSSEELQANKATLVCLISDFYPGAVTVAWKADSSPVKAGVETTTPSKQSNNKYAASSYLSLTPEQWKSHRSYSCQVTHEGSTVEKTVAPTECS

SEQ ID NO: 954 - protein, 228 aa, Artificial sequence
  an artificially synthesized sequence
QSVLTQPPSASGTPGQRVTISCSGSSSNIGSNTVNWYQRLPGAAPQLLIYNNDQRPSGIPDRFSGSKSGTSGSLVISGLQSEDEADYYCASWDDSLNGRVFGGGTKLTVLTSTSGRSANPHGGQPKAAPSVTLFPPSSEELQANKATLVCLISDFYPGAVTVAWKADSSPVKAGVETTTPSKQSNNKYAASSYLSLTPEQWKSHRSYSCQVTHEGSTVEKTVAPTECS

SEQ ID NO: 955 - protein, 228 aa, Artificial sequence
  an artificially synthesized sequence
QSVLTQPPSASGTPGQRVTISCSGSSSNIGSNTVNWYQRLPGAAPQLLIYNNDQRPSGIPDRFSGSKSGTSGSLVISGLQSEDEADYYCASWDDSLNGRVFGGGTKLTVLTSTSGRSANPIGGQPKAAPSVTLFPPSSEELQANKATLVCLISDFYPGAVTVAWKADSSPVKAGVETTTPSKQSNNKYAASSYLSLTPEQWKSHRSYSCQVTHEGSTVEKTVAPTECS

SEQ ID NO: 956 - protein, 228 aa, Artificial sequence
  an artificially synthesized sequence
QSVLTQPPSASGTPGQRVTISCSGSSSNIGSNTVNWYQRLPGAAPQLLIYNNDQRPSGIPDRFSGSKSGTSGSLVISGLQSEDEADYYCASWDDSLNGRVFGGGTKLTVLTSTSGRSANPLGGQPKAAPSVTLFPPSSEELQANKATLVCLISDFYPGAVTVAWKADSSPVKAGVETTTPSKQSNNKYAASSYLSLTPEQWKSHRSYSCQVTHEGSTVEKTVAPTECS

SEQ ID NO: 957 - protein, 228 aa, Artificial sequence
  an artificially synthesized sequence
QSVLTQPPSASGTPGQRVTISCSGSSSNIGSNTVNWYQRLPGAAPQLLIYNNDQRPSGIPDRFSGSKSGTSGSLVISGLQSEDEADYYCASWDDSLNGRVFGGGTKLTVLTSTSGRSANPSGGQPKAAPSVTLFPPSSEELQANKATLVCLISDFYPGAVTVAWKADSSPVKAGVETTTPSKQSNNKYAASSYLSLTPEQWKSHRSYSCQVTHEGSTVEKTVAPTECS

SEQ ID NO: 958 - protein, 228 aa, Artificial sequence
  an artificially synthesized sequence
QSVLTQPPSASGTPGQRVTISCSGSSSNIGSNTVNWYQRLPGAAPQLLIYNNDQRPSGIPDRFSGSKSGTSGSLVISGLQSEDEADYYCASWDDSLNGRVFGGGTKLTVLISTSGRSANPIGGQPKAAPSVTLFPPSSEELQANKATLVCLISDFYPGAVTVAWKADSSPVKAGVETTTPSKQSNNKYAASSYLSLTPEQWKSHRSYSCQVTHEGSTVEKTVAPTECS

SEQ ID NO: 959 - protein, 228 aa, Artificial sequence
  an artificially synthesized sequence
QSVLTQPPSASGTPGQRVTISCSGSSSNIGSNTVNWYQRLPGAAPQLLIYNNDQRPSGIPDRFSGSKSGTSGSLVISGLQSEDEADYYCASWDDSLNGRVFGGGTKLTVLYSTSGRSANPIGGQPKAAPSVTLFPPSSEELQANKATLVCLISDFYPGAVTVAWKADSSPVKAGVETTTPSKQSNNKYAASSYLSLTPEQWKSHRSYSCQVTHEGSTVEKTVAPTECS

SEQ ID NO: 960 - protein, 228 aa, Artificial sequence
  an artificially synthesized sequence
QSVLTQPPSASGTPGQRVTISCSGSSSNIGSNTVNWYQRLPGAAPQLLIYNNDQRPSGIPDRFSGSKSGTSGSLVISGLQSEDEADYYCASWDDSLNGRVFGGGTKLTVLTSYSGRSAVPAGGQPKAAPSVTLFPPSSEELQANKATLVCLISDFYPGAVTVAWKADSSPVKAGVETTTPSKQSNNKYAASSYLSLTPEQWKSHRSYSCQVTHEGSTVEKTVAPTECS

SEQ ID NO: 961 - protein, 228 aa, Artificial sequence
  an artificially synthesized sequence
QSVLTQPPSASGTPGQRVTISCSGSSSNIGSNTVNWYQRLPGAAPQLLIYNNDQRPSGIPDRFSGSKSGTSGSLVISGLQSEDEADYYCASWDDSLNGRVFGGGTKLTVLTSPSGRSANIAGGQPKAAPSVTLFPPSSEELQANKATLVCLISDFYPGAVTVAWKADSSPVKAGVETTTPSKQSNNKYAASSYLSLTPEQWKSHRSYSCQVTHEGSTVEKTVAPTECS

SEQ ID NO: 962 - protein, 228 aa, Artificial sequence
  an artificially synthesized sequence
QSVLTQPPSASGTPGQRVTISCSGSSSNIGSNTVNWYQRLPGAAPQLLIYNNDQRPSGIPDRFSGSKSGTSGSLVISGLQSEDEADYYCASWDDSLNGRVFGGGTKLTVLTSPSGRSANFAGGQPKAAPSVTLFPPSSEELQANKATLVCLISDFYPGAVTVAWKADSSPVKAGVETTTPSKQSNNKYAASSYLSLTPEQWKSHRSYSCQVTHEGSTVEKTVAPTECS

SEQ ID NO: 963 - protein, 228 aa, Artificial sequence
  an artificially synthesized sequence
QSVLTQPPSASGTPGQRVTISCSGSSSNIGSNTVNWYQRLPGAAPQLLIYNNDQRPSGIPDRFSGSKSGTSGSLVISGLQSEDEADYYCASWDDSLNGRVFGGGTKLTVLTSPTGRSANPAGGQPKAAPSVTLFPPSSEELQANKATLVCLISDFYPGAVTVAWKADSSPVKAGVETTTPSKQSNNKYAASSYLSLTPEQWKSHRSYSCQVTHEGSTVEKTVAPTECS

SEQ ID NO: 964 - protein, 228 aa, Artificial sequence
  an artificially synthesized sequence
QSVLTQPPSASGTPGQRVTISCSGSSSNIGSNTVNWYQRLPGAAPQLLIYNNDQRPSGIPDRFSGSKSGTSGSLVISGLQSEDEADYYCASWDDSLNGRVFGGGTKLTVLTSPSGRSAIPAGGQPKAAPSVTLFPPSSEELQANKATLVCLISDFYPGAVTVAWKADSSPVKAGVETTTPSKQSNNKYAASSYLSLTPEQWKSHRSYSCQVTHEGSTVEKTVAPTECS

SEQ ID NO: 965 - protein, 228 aa, Artificial sequence
  an artificially synthesized sequence
QSVLTQPPSASGTPGQRVTISCSGSSSNIGSNTVNWYQRLPGAAPQLLIYNNDQRPSGIPDRFSGSKSGTSGSLVISGLQSEDEADYYCASWDDSLNGRVFGGGTKLTVLTSYTGRSANPAGGQPKAAPSVTLFPPSSEELQANKATLVCLISDFYPGAVTVAWKADSSPVKAGVETTTPSKQSNNKYAASSYLSLTPEQWKSHRSYSCQVTHEGSTVEKTVAPTECS

SEQ ID NO: 966 - protein, 228 aa, Artificial sequence
  an artificially synthesized sequence
QSVLTQPPSASGTPGQRVTISCSGSSSNIGSNTVNWYQRLPGAAPQLLIYNNDQRPSGIPDRFSGSKSGTSGSLVISGLQSEDEADYYCASWDDSLNGRVFGGGTKLTVLTSYSGRSAIPAGGQPKAAPSVTLFPPSSEELQANKATLVCLISDFYPGAVTVAWKADSSPVKAGVETTTPSKQSNNKYAASSYLSLTPEQWKSHRSYSCQVTHEGSTVEKTVAPTECS

SEQ ID NO: 967 - protein, 228 aa, Artificial sequence
  an artificially synthesized sequence
QSVLTQPPSASGTPGQRVTISCSGSSSNIGSNTVNWYQRLPGAAPQLLIYNNDQRPSGIPDRFSGSKSGTSGSLVISGLQSEDEADYYCASWDDSLNGRVFGGGTKLTVLTSISGRSANYAGGQPKAAPSVTLFPPSSEELQANKATLVCLISDFYPGAVTVAWKADSSPVKAGVETTTPSKQSNNKYAASSYLSLTPEQWKSHRSYSCQVTHEGSTVEKTVAPTECS

SEQ ID NO: 968 - protein, 228 aa, Artificial sequence
  an artificially synthesized sequence
QSVLTQPPSASGTPGQRVTISCSGSSSNIGSNTVNWYQRLPGAAPQLLIYNNDQRPSGIPDRFSGSKSGTSGSLVISGLQSEDEADYYCASWDDSLNGRVFGGGTKLTVLTSPSGRSAGPAGGQPKAAPSVTLFPPSSEELQANKATLVCLISDFYPGAVTVAWKADSSPVKAGVETTTPSKQSNNKYAASSYLSLTPEQWKSHRSYSCQVTHEGSTVEKTVAPTECS

SEQ ID NO: 969 - protein, 228 aa, Artificial sequence
  an artificially synthesized sequence
QSVLTQPPSASGTPGQRVTISCSGSSSNIGSNTVNWYQRLPGAAPQLLIYNNDQRPSGIPDRFSGSKSGTSGSLVISGLQSEDEADYYCASWDDSLNGRVFGGGTKLTVLTSYTGRSAVPAGGQPKAAPSVTLFPPSSEELQANKATLVCLISDFYPGAVTVAWKADSSPVKAGVETTTPSKQSNNKYAASSYLSLTPEQWKSHRSYSCQVTHEGSTVEKTVAPTECS

SEQ ID NO: 970 - protein, 228 aa, Artificial sequence
  an artificially synthesized sequence
QSVLTQPPSASGTPGQRVTISCSGSSSNIGSNTVNWYQRLPGAAPQLLIYNNDQRPSGIPDRFSGSKSGTSGSLVISGLQSEDEADYYCASWDDSLNGRVFGGGTKLTVLTSYTGRSAVYAGGQPKAAPSVTLFPPSSEELQANKATLVCLISDFYPGAVTVAWKADSSPVKAGVETTTPSKQSNNKYAASSYLSLTPEQWKSHRSYSCQVTHEGSTVEKTVAPTECS

SEQ ID NO: 971 - protein, 228 aa, Artificial sequence
  an artificially synthesized sequence
QSVLTQPPSASGTPGQRVTISCSGSSSNIGSNTVNWYQRLPGAAPQLLIYNNDQRPSGIPDRFSGSKSGTSGSLVISGLQSEDEADYYCASWDDSLNGRVFGGGTKLTVLTSYTGRSAVVAGGQPKAAPSVTLFPPSSEELQANKATLVCLISDFYPGAVTVAWKADSSPVKAGVETTTPSKQSNNKYAASSYLSLTPEQWKSHRSYSCQVTHEGSTVEKTVAPTECS

SEQ ID NO: 972 - protein, 228 aa, Artificial sequence
  an artificially synthesized sequence
QSVLTQPPSASGTPGQRVTISCSGSSSNIGSNTVNWYQRLPGAAPQLLIYNNDQRPSGIPDRFSGSKSGTSGSLVISGLQSEDEADYYCASWDDSLNGRVFGGGTKLTVLTSYTGRSAVHAGGQPKAAPSVTLFPPSSEELQANKATLVCLISDFYPGAVTVAWKADSSPVKAGVETTTPSKQSNNKYAASSYLSLTPEQWKSHRSYSCQVTHEGSTVEKTVAPTECS

SEQ ID NO: 973 - protein, 228 aa, Artificial sequence
  an artificially synthesized sequence
QSVLTQPPSASGTPGQRVTISCSGSSSNIGSNTVNWYQRLPGAAPQLLIYNNDQRPSGIPDRFSGSKSGTSGSLVISGLQSEDEADYYCASWDDSLNGRVFGGGTKLTVLTSYSGRSAVPHGGQPKAAPSVTLFPPSSEELQANKATLVCLISDFYPGAVTVAWKADSSPVKAGVETTTPSKQSNNKYAASSYLSLTPEQWKSHRSYSCQVTHEGSTVEKTVAPTECS

SEQ ID NO: 974 - protein, 228 aa, Artificial sequence
  an artificially synthesized sequence
QSVLTQPPSASGTPGQRVTISCSGSSSNIGSNTVNWYQRLPGAAPQLLIYNNDQRPSGIPDRFSGSKSGTSGSLVISGLQSEDEADYYCASWDDSLNGRVFGGGTKLTVLTSPSGRSANIHGGQPKAAPSVTLFPPSSEELQANKATLVCLISDFYPGAVTVAWKADSSPVKAGVETTTPSKQSNNKYAASSYLSLTPEQWKSHRSYSCQVTHEGSTVEKTVAPTECS

SEQ ID NO: 975 - protein, 228 aa, Artificial sequence
  an artificially synthesized sequence
QSVLTQPPSASGTPGQRVTISCSGSSSNIGSNTVNWYQRLPGAAPQLLIYNNDQRPSGIPDRFSGSKSGTSGSLVISGLQSEDEADYYCASWDDSLNGRVFGGGTKLTVLTSPSGRSANFHGGQPKAAPSVTLFPPSSEELQANKATLVCLISDFYPGAVTVAWKADSSPVKAGVETTTPSKQSNNKYAASSYLSLTPEQWKSHRSYSCQVTHEGSTVEKTVAPTECS

SEQ ID NO: 976 - protein, 228 aa, Artificial sequence
  an artificially synthesized sequence
QSVLTQPPSASGTPGQRVTISCSGSSSNIGSNTVNWYQRLPGAAPQLLIYNNDQRPSGIPDRFSGSKSGTSGSLVISGLQSEDEADYYCASWDDSLNGRVFGGGTKLTVLTSPTGRSANPHGGQPKAAPSVTLFPPSSEELQANKATLVCLISDFYPGAVTVAWKADSSPVKAGVETTTPSKQSNNKYAASSYLSLTPEQWKSHRSYSCQVTHEGSTVEKTVAPTECS

SEQ ID NO: 977 - protein, 228 aa, Artificial sequence
  an artificially synthesized sequence
QSVLTQPPSASGTPGQRVTISCSGSSSNIGSNTVNWYQRLPGAAPQLLIYNNDQRPSGIPDRFSGSKSGTSGSLVISGLQSEDEADYYCASWDDSLNGRVFGGGTKLTVLTSPSGRSAIPHGGQPKAAPSVTLFPPSSEELQANKATLVCLISDFYPGAVTVAWKADSSPVKAGVETTTPSKQSNNKYAASSYLSLTPEQWKSHRSYSCQVTHEGSTVEKTVAPTECS

SEQ ID NO: 978 - protein, 228 aa, Artificial sequence
  an artificially synthesized sequence
QSVLTQPPSASGTPGQRVTISCSGSSSNIGSNTVNWYQRLPGAAPQLLIYNNDQRPSGIPDRFSGSKSGTSGSLVISGLQSEDEADYYCASWDDSLNGRVFGGGTKLTVLTSYTGRSANPHGGQPKAAPSVTLFPPSSEELQANKATLVCLISDFYPGAVTVAWKADSSPVKAGVETTTPSKQSNNKYAASSYLSLTPEQWKSHRSYSCQVTHEGSTVEKTVAPTECS

SEQ ID NO: 979 - protein, 228 aa, Artificial sequence
  an artificially synthesized sequence
QSVLTQPPSASGTPGQRVTISCSGSSSNIGSNTVNWYQRLPGAAPQLLIYNNDQRPSGIPDRFSGSKSGTSGSLVISGLQSEDEADYYCASWDDSLNGRVFGGGTKLTVLTSYSGRSAIPHGGQPKAAPSVTLFPPSSEELQANKATLVCLISDFYPGAVTVAWKADSSPVKAGVETTTPSKQSNNKYAASSYLSLTPEQWKSHRSYSCQVTHEGSTVEKTVAPTECS

SEQ ID NO: 980 - protein, 228 aa, Artificial sequence
  an artificially synthesized sequence
QSVLTQPPSASGTPGQRVTISCSGSSSNIGSNTVNWYQRLPGAAPQLLIYNNDQRPSGIPDRFSGSKSGTSGSLVISGLQSEDEADYYCASWDDSLNGRVFGGGTKLTVLTSISGRSANYHGGQPKAAPSVTLFPPSSEELQANKATLVCLISDFYPGAVTVAWKADSSPVKAGVETTTPSKQSNNKYAASSYLSLTPEQWKSHRSYSCQVTHEGSTVEKTVAPTECS

SEQ ID NO: 981 - protein, 228 aa, Artificial sequence
  an artificially synthesized sequence
QSVLTQPPSASGTPGQRVTISCSGSSSNIGSNTVNWYQRLPGAAPQLLIYNNDQRPSGIPDRFSGSKSGTSGSLVISGLQSEDEADYYCASWDDSLNGRVFGGGTKLTVLTSPSGRSAGPHGGQPKAAPSVTLFPPSSEELQANKATLVCLISDFYPGAVTVAWKADSSPVKAGVETTTPSKQSNNKYAASSYLSLTPEQWKSHRSYSCQVTHEGSTVEKTVAPTECS

SEQ ID NO: 982 - protein, 228 aa, Artificial sequence
  an artificially synthesized sequence
QSVLTQPPSASGTPGQRVTISCSGSSSNIGSNTVNWYQRLPGAAPQLLIYNNDQRPSGIPDRFSGSKSGTSGSLVISGLQSEDEADYYCASWDDSLNGRVFGGGTKLTVLTSYTGRSAVPHGGQPKAAPSVTLFPPSSEELQANKATLVCLISDFYPGAVTVAWKADSSPVKAGVETTTPSKQSNNKYAASSYLSLTPEQWKSHRSYSCQVTHEGSTVEKTVAPTECS

SEQ ID NO: 983 - protein, 228 aa, Artificial sequence
  an artificially synthesized sequence
QSVLTQPPSASGTPGQRVTISCSGSSSNIGSNTVNWYQRLPGAAPQLLIYNNDQRPSGIPDRFSGSKSGTSGSLVISGLQSEDEADYYCASWDDSLNGRVFGGGTKLTVLTSYTGRSAVYHGGQPKAAPSVTLFPPSSEELQANKATLVCLISDFYPGAVTVAWKADSSPVKAGVETTTPSKQSNNKYAASSYLSLTPEQWKSHRSYSCQVTHEGSTVEKTVAPTECS

SEQ ID NO: 984 - protein, 228 aa, Artificial sequence
  an artificially synthesized sequence
QSVLTQPPSASGTPGQRVTISCSGSSSNIGSNTVNWYQRLPGAAPQLLIYNNDQRPSGIPDRFSGSKSGTSGSLVISGLQSEDEADYYCASWDDSLNGRVFGGGTKLTVLTSYTGRSAVVHGGQPKAAPSVTLFPPSSEELQANKATLVCLISDFYPGAVTVAWKADSSPVKAGVETTTPSKQSNNKYAASSYLSLTPEQWKSHRSYSCQVTHEGSTVEKTVAPTECS

SEQ ID NO: 985 - protein, 228 aa, Artificial sequence
  an artificially synthesized sequence
QSVLTQPPSASGTPGQRVTISCSGSSSNIGSNTVNWYQRLPGAAPQLLIYNNDQRPSGIPDRFSGSKSGTSGSLVISGLQSEDEADYYCASWDDSLNGRVFGGGTKLTVLTSYTGRSAVHHGGQPKAAPSVTLFPPSSEELQANKATLVCLISDFYPGAVTVAWKADSSPVKAGVETTTPSKQSNNKYAASSYLSLTPEQWKSHRSYSCQVTHEGSTVEKTVAPTECS

SEQ ID NO: 986 - protein, 228 aa, Artificial sequence
  an artificially synthesized sequence
QSVLTQPPSASGTPGQRVTISCSGSSSNIGSNTVNWYQRLPGAAPQLLIYNNDQRPSGIPDRFSGSKSGTSGSLVISGLQSEDEADYYCASWDDSLNGRVFGGGTKLTVLTSYSGRSAVPIGGQPKAAPSVTLFPPSSEELQANKATLVCLISDFYPGAVTVAWKADSSPVKAGVETTTPSKQSNNKYAASSYLSLTPEQWKSHRSYSCQVTHEGSTVEKTVAPTECS

SEQ ID NO: 987 - protein, 228 aa, Artificial sequence
  an artificially synthesized sequence
QSVLTQPPSASGTPGQRVTISCSGSSSNIGSNTVNWYQRLPGAAPQLLIYNNDQRPSGIPDRFSGSKSGTSGSLVISGLQSEDEADYYCASWDDSLNGRVFGGGTKLTVLTSPSGRSANIIGGQPKAAPSVTLFPPSSEELQANKATLVCLISDFYPGAVTVAWKADSSPVKAGVETTTPSKQSNNKYAASSYLSLTPEQWKSHRSYSCQVTHEGSTVEKTVAPTECS

SEQ ID NO: 988 - protein, 228 aa, Artificial sequence
  an artificially synthesized sequence
QSVLTQPPSASGTPGQRVTISCSGSSSNIGSNTVNWYQRLPGAAPQLLIYNNDQRPSGIPDRFSGSKSGTSGSLVISGLQSEDEADYYCASWDDSLNGRVFGGGTKLTVLTSPSGRSANFIGGQPKAAPSVTLFPPSSEELQANKATLVCLISDFYPGAVTVAWKADSSPVKAGVETTTPSKQSNNKYAASSYLSLTPEQWKSHRSYSCQVTHEGSTVEKTVAPTECS

SEQ ID NO: 989 - protein, 228 aa, Artificial sequence
  an artificially synthesized sequence
QSVLTQPPSASGTPGQRVTISCSGSSSNIGSNTVNWYQRLPGAAPQLLIYNNDQRPSGIPDRFSGSKSGTSGSLVISGLQSEDEADYYCASWDDSLNGRVFGGGTKLTVLTSPTGRSANPIGGQPKAAPSVTLFPPSSEELQANKATLVCLISDFYPGAVTVAWKADSSPVKAGVETTTPSKQSNNKYAASSYLSLTPEQWKSHRSYSCQVTHEGSTVEKTVAPTECS

SEQ ID NO: 990 - protein, 228 aa, Artificial sequence
  an artificially synthesized sequence
QSVLTQPPSASGTPGQRVTISCSGSSSNIGSNTVNWYQRLPGAAPQLLIYNNDQRPSGIPDRFSGSKSGTSGSLVISGLQSEDEADYYCASWDDSLNGRVFGGGTKLTVLTSPSGRSAIPIGGQPKAAPSVTLFPPSSEELQANKATLVCLISDFYPGAVTVAWKADSSPVKAGVETTTPSKQSNNKYAASSYLSLTPEQWKSHRSYSCQVTHEGSTVEKTVAPTECS

SEQ ID NO: 991 - protein, 228 aa, Artificial sequence
  an artificially synthesized sequence
QSVLTQPPSASGTPGQRVTISCSGSSSNIGSNTVNWYQRLPGAAPQLLIYNNDQRPSGIPDRFSGSKSGTSGSLVISGLQSEDEADYYCASWDDSLNGRVFGGGTKLTVLTSYTGRSANPIGGQPKAAPSVTLFPPSSEELQANKATLVCLISDFYPGAVTVAWKADSSPVKAGVETTTPSKQSNNKYAASSYLSLTPEQWKSHRSYSCQVTHEGSTVEKTVAPTECS

SEQ ID NO: 992 - protein, 228 aa, Artificial sequence
  an artificially synthesized sequence
QSVLTQPPSASGTPGQRVTISCSGSSSNIGSNTVNWYQRLPGAAPQLLIYNNDQRPSGIPDRFSGSKSGTSGSLVISGLQSEDEADYYCASWDDSLNGRVFGGGTKLTVLTSYSGRSAIPIGGQPKAAPSVTLFPPSSEELQANKATLVCLISDFYPGAVTVAWKADSSPVKAGVETTTPSKQSNNKYAASSYLSLTPEQWKSHRSYSCQVTHEGSTVEKTVAPTECS

SEQ ID NO: 993 - protein, 228 aa, Artificial sequence
  an artificially synthesized sequence
QSVLTQPPSASGTPGQRVTISCSGSSSNIGSNTVNWYQRLPGAAPQLLIYNNDQRPSGIPDRFSGSKSGTSGSLVISGLQSEDEADYYCASWDDSLNGRVFGGGTKLTVLTSISGRSANYIGGQPKAAPSVTLFPPSSEELQANKATLVCLISDFYPGAVTVAWKADSSPVKAGVETTTPSKQSNNKYAASSYLSLTPEQWKSHRSYSCQVTHEGSTVEKTVAPTECS

SEQ ID NO: 994 - protein, 228 aa, Artificial sequence
  an artificially synthesized sequence
QSVLTQPPSASGTPGQRVTISCSGSSSNIGSNTVNWYQRLPGAAPQLLIYNNDQRPSGIPDRFSGSKSGTSGSLVISGLQSEDEADYYCASWDDSLNGRVFGGGTKLTVLTSPSGRSAGPIGGQPKAAPSVTLFPPSSEELQANKATLVCLISDFYPGAVTVAWKADSSPVKAGVETTTPSKQSNNKYAASSYLSLTPEQWKSHRSYSCQVTHEGSTVEKTVAPTECS

SEQ ID NO: 995 - protein, 228 aa, Artificial sequence
  an artificially synthesized sequence
QSVLTQPPSASGTPGQRVTISCSGSSSNIGSNTVNWYQRLPGAAPQLLIYNNDQRPSGIPDRFSGSKSGTSGSLVISGLQSEDEADYYCASWDDSLNGRVFGGGTKLTVLTSYTGRSAVPIGGQPKAAPSVTLFPPSSEELQANKATLVCLISDFYPGAVTVAWKADSSPVKAGVETTTPSKQSNNKYAASSYLSLTPEQWKSHRSYSCQVTHEGSTVEKTVAPTECS

SEQ ID NO: 996 - protein, 228 aa, Artificial sequence
  an artificially synthesized sequence
QSVLTQPPSASGTPGQRVTISCSGSSSNIGSNTVNWYQRLPGAAPQLLIYNNDQRPSGIPDRFSGSKSGTSGSLVISGLQSEDEADYYCASWDDSLNGRVFGGGTKLTVLTSYTGRSAVYIGGQPKAAPSVTLFPPSSEELQANKATLVCLISDFYPGAVTVAWKADSSPVKAGVETTTPSKQSNNKYAASSYLSLTPEQWKSHRSYSCQVTHEGSTVEKTVAPTECS

SEQ ID NO: 997 - protein, 228 aa, Artificial sequence
  an artificially synthesized sequence
QSVLTQPPSASGTPGQRVTISCSGSSSNIGSNTVNWYQRLPGAAPQLLIYNNDQRPSGIPDRFSGSKSGTSGSLVISGLQSEDEADYYCASWDDSLNGRVFGGGTKLTVLTSYTGRSAVVIGGQPKAAPSVTLFPPSSEELQANKATLVCLISDFYPGAVTVAWKADSSPVKAGVETTTPSKQSNNKYAASSYLSLTPEQWKSHRSYSCQVTHEGSTVEKTVAPTECS

SEQ ID NO: 998 - protein, 228 aa, Artificial sequence
  an artificially synthesized sequence
QSVLTQPPSASGTPGQRVTISCSGSSSNIGSNTVNWYQRLPGAAPQLLIYNNDQRPSGIPDRFSGSKSGTSGSLVISGLQSEDEADYYCASWDDSLNGRVFGGGTKLTVLTSYTGRSAVHIGGQPKAAPSVTLFPPSSEELQANKATLVCLISDFYPGAVTVAWKADSSPVKAGVETTTPSKQSNNKYAASSYLSLTPEQWKSHRSYSCQVTHEGSTVEKTVAPTECS

SEQ ID NO: 999 - protein, 228 aa, Artificial sequence
  an artificially synthesized sequence
QSVLTQPPSASGTPGQRVTISCSGSSSNIGSNTVNWYQRLPGAAPQLLIYNNDQRPSGIPDRFSGSKSGTSGSLVISGLQSEDEADYYCASWDDSLNGRVFGGGTKLTVLTSYSGRSAVPLGGQPKAAPSVTLFPPSSEELQANKATLVCLISDFYPGAVTVAWKADSSPVKAGVETTTPSKQSNNKYAASSYLSLTPEQWKSHRSYSCQVTHEGSTVEKTVAPTECS

SEQ ID NO: 1000 - protein, 228 aa, Artificial sequence
  an artificially synthesized sequence
QSVLTQPPSASGTPGQRVTISCSGSSSNIGSNTVNWYQRLPGAAPQLLIYNNDQRPSGIPDRFSGSKSGTSGSLVISGLQSEDEADYYCASWDDSLNGRVFGGGTKLTVLTSPSGRSANILGGQPKAAPSVTLFPPSSEELQANKATLVCLISDFYPGAVTVAWKADSSPVKAGVETTTPSKQSNNKYAASSYLSLTPEQWKSHRSYSCQVTHEGSTVEKTVAPTECS

SEQ ID NO: 1001 - protein, 228 aa, Artificial sequence
  an artificially synthesized sequence
QSVLTQPPSASGTPGQRVTISCSGSSSNIGSNTVNWYQRLPGAAPQLLIYNNDQRPSGIPDRFSGSKSGTSGSLVISGLQSEDEADYYCASWDDSLNGRVFGGGTKLTVLTSPSGRSANFLGGQPKAAPSVTLFPPSSEELQANKATLVCLISDFYPGAVTVAWKADSSPVKAGVETTTPSKQSNNKYAASSYLSLTPEQWKSHRSYSCQVTHEGSTVEKTVAPTECS

SEQ ID NO: 1002 - protein, 228 aa, Artificial sequence
  an artificially synthesized sequence
QSVLTQPPSASGTPGQRVTISCSGSSSNIGSNTVNWYQRLPGAAPQLLIYNNDQRPSGIPDRFSGSKSGTSGSLVISGLQSEDEADYYCASWDDSLNGRVFGGGTKLTVLTSPTGRSANPLGGQPKAAPSVTLFPPSSEELQANKATLVCLISDFYPGAVTVAWKADSSPVKAGVETTTPSKQSNNKYAASSYLSLTPEQWKSHRSYSCQVTHEGSTVEKTVAPTECS

SEQ ID NO: 1003 - protein, 228 aa, Artificial sequence
  an artificially synthesized sequence
QSVLTQPPSASGTPGQRVTISCSGSSSNIGSNTVNWYQRLPGAAPQLLIYNNDQRPSGIPDRFSGSKSGTSGSLVISGLQSEDEADYYCASWDDSLNGRVFGGGTKLTVLTSPSGRSAIPLGGQPKAAPSVTLFPPSSEELQANKATLVCLISDFYPGAVTVAWKADSSPVKAGVETTTPSKQSNNKYAASSYLSLTPEQWKSHRSYSCQVTHEGSTVEKTVAPTECS

SEQ ID NO: 1004 - protein, 228 aa, Artificial sequence
  an artificially synthesized sequence
QSVLTQPPSASGTPGQRVTISCSGSSSNIGSNTVNWYQRLPGAAPQLLIYNNDQRPSGIPDRFSGSKSGTSGSLVISGLQSEDEADYYCASWDDSLNGRVFGGGTKLTVLTSYTGRSANPLGGQPKAAPSVTLFPPSSEELQANKATLVCLISDFYPGAVTVAWKADSSPVKAGVETTTPSKQSNNKYAASSYLSLTPEQWKSHRSYSCQVTHEGSTVEKTVAPTECS

SEQ ID NO: 1005 - protein, 228 aa, Artificial sequence
  an artificially synthesized sequence
QSVLTQPPSASGTPGQRVTISCSGSSSNIGSNTVNWYQRLPGAAPQLLIYNNDQRPSGIPDRFSGSKSGTSGSLVISGLQSEDEADYYCASWDDSLNGRVFGGGTKLTVLTSYSGRSAIPLGGQPKAAPSVTLFPPSSEELQANKATLVCLISDFYPGAVTVAWKADSSPVKAGVETTTPSKQSNNKYAASSYLSLTPEQWKSHRSYSCQVTHEGSTVEKTVAPTECS

SEQ ID NO: 1006 - protein, 228 aa, Artificial sequence
  an artificially synthesized sequence
QSVLTQPPSASGTPGQRVTISCSGSSSNIGSNTVNWYQRLPGAAPQLLIYNNDQRPSGIPDRFSGSKSGTSGSLVISGLQSEDEADYYCASWDDSLNGRVFGGGTKLTVLTSISGRSANYLGGQPKAAPSVTLFPPSSEELQANKATLVCLISDFYPGAVTVAWKADSSPVKAGVETTTPSKQSNNKYAASSYLSLTPEQWKSHRSYSCQVTHEGSTVEKTVAPTECS

SEQ ID NO: 1007 - protein, 228 aa, Artificial sequence
  an artificially synthesized sequence
QSVLTQPPSASGTPGQRVTISCSGSSSNIGSNTVNWYQRLPGAAPQLLIYNNDQRPSGIPDRFSGSKSGTSGSLVISGLQSEDEADYYCASWDDSLNGRVFGGGTKLTVLTSPSGRSAGPLGGQPKAAPSVTLFPPSSEELQANKATLVCLISDFYPGAVTVAWKADSSPVKAGVETTTPSKQSNNKYAASSYLSLTPEQWKSHRSYSCQVTHEGSTVEKTVAPTECS

SEQ ID NO: 1008 - protein, 228 aa, Artificial sequence
  an artificially synthesized sequence
QSVLTQPPSASGTPGQRVTISCSGSSSNIGSNTVNWYQRLPGAAPQLLIYNNDQRPSGIPDRFSGSKSGTSGSLVISGLQSEDEADYYCASWDDSLNGRVFGGGTKLTVLTSYTGRSAVPLGGQPKAAPSVTLFPPSSEELQANKATLVCLISDFYPGAVTVAWKADSSPVKAGVETTTPSKQSNNKYAASSYLSLTPEQWKSHRSYSCQVTHEGSTVEKTVAPTECS

SEQ ID NO: 1009 - protein, 228 aa, Artificial sequence
  an artificially synthesized sequence
QSVLTQPPSASGTPGQRVTISCSGSSSNIGSNTVNWYQRLPGAAPQLLIYNNDQRPSGIPDRFSGSKSGTSGSLVISGLQSEDEADYYCASWDDSLNGRVFGGGTKLTVLTSYTGRSAVYLGGQPKAAPSVTLFPPSSEELQANKATLVCLISDFYPGAVTVAWKADSSPVKAGVETTTPSKQSNNKYAASSYLSLTPEQWKSHRSYSCQVTHEGSTVEKTVAPTECS

SEQ ID NO: 1010 - protein, 228 aa, Artificial sequence
  an artificially synthesized sequence
QSVLTQPPSASGTPGQRVTISCSGSSSNIGSNTVNWYQRLPGAAPQLLIYNNDQRPSGIPDRFSGSKSGTSGSLVISGLQSEDEADYYCASWDDSLNGRVFGGGTKLTVLTSYTGRSAVVLGGQPKAAPSVTLFPPSSEELQANKATLVCLISDFYPGAVTVAWKADSSPVKAGVETTTPSKQSNNKYAASSYLSLTPEQWKSHRSYSCQVTHEGSTVEKTVAPTECS

SEQ ID NO: 1011 - protein, 228 aa, Artificial sequence
  an artificially synthesized sequence
QSVLTQPPSASGTPGQRVTISCSGSSSNIGSNTVNWYQRLPGAAPQLLIYNNDQRPSGIPDRFSGSKSGTSGSLVISGLQSEDEADYYCASWDDSLNGRVFGGGTKLTVLTSYTGRSAVHLGGQPKAAPSVTLFPPSSEELQANKATLVCLISDFYPGAVTVAWKADSSPVKAGVETTTPSKQSNNKYAASSYLSLTPEQWKSHRSYSCQVTHEGSTVEKTVAPTECS

SEQ ID NO: 1012 - protein, 228 aa, Artificial sequence
  an artificially synthesized sequence
QSVLTQPPSASGTPGQRVTISCSGSSSNIGSNTVNWYQRLPGAAPQLLIYNNDQRPSGIPDRFSGSKSGTSGSLVISGLQSEDEADYYCASWDDSLNGRVFGGGTKLTVLTSYSGRSAVPSGGQPKAAPSVTLFPPSSEELQANKATLVCLISDFYPGAVTVAWKADSSPVKAGVETTTPSKQSNNKYAASSYLSLTPEQWKSHRSYSCQVTHEGSTVEKTVAPTECS

SEQ ID NO: 1013 - protein, 228 aa, Artificial sequence
  an artificially synthesized sequence
QSVLTQPPSASGTPGQRVTISCSGSSSNIGSNTVNWYQRLPGAAPQLLIYNNDQRPSGIPDRFSGSKSGTSGSLVISGLQSEDEADYYCASWDDSLNGRVFGGGTKLTVLTSPSGRSANISGGQPKAAPSVTLFPPSSEELQANKATLVCLISDFYPGAVTVAWKADSSPVKAGVETTTPSKQSNNKYAASSYLSLTPEQWKSHRSYSCQVTHEGSTVEKTVAPTECS

SEQ ID NO: 1014 - protein, 228 aa, Artificial sequence
  an artificially synthesized sequence
QSVLTQPPSASGTPGQRVTISCSGSSSNIGSNTVNWYQRLPGAAPQLLIYNNDQRPSGIPDRFSGSKSGTSGSLVISGLQSEDEADYYCASWDDSLNGRVFGGGTKLTVLTSPSGRSANFSGGQPKAAPSVTLFPPSSEELQANKATLVCLISDFYPGAVTVAWKADSSPVKAGVETTTPSKQSNNKYAASSYLSLTPEQWKSHRSYSCQVTHEGSTVEKTVAPTECS

SEQ ID NO: 1015 - protein, 228 aa, Artificial sequence
  an artificially synthesized sequence
QSVLTQPPSASGTPGQRVTISCSGSSSNIGSNTVNWYQRLPGAAPQLLIYNNDQRPSGIPDRFSGSKSGTSGSLVISGLQSEDEADYYCASWDDSLNGRVFGGGTKLTVLTSPTGRSANPSGGQPKAAPSVTLFPPSSEELQANKATLVCLISDFYPGAVTVAWKADSSPVKAGVETTTPSKQSNNKYAASSYLSLTPEQWKSHRSYSCQVTHEGSTVEKTVAPTECS

SEQ ID NO: 1016 - protein, 228 aa, Artificial sequence
  an artificially synthesized sequence
QSVLTQPPSASGTPGQRVTISCSGSSSNIGSNTVNWYQRLPGAAPQLLIYNNDQRPSGIPDRFSGSKSGTSGSLVISGLQSEDEADYYCASWDDSLNGRVFGGGTKLTVLTSPSGRSAIPSGGQPKAAPSVTLFPPSSEELQANKATLVCLISDFYPGAVTVAWKADSSPVKAGVETTTPSKQSNNKYAASSYLSLTPEQWKSHRSYSCQVTHEGSTVEKTVAPTECS

SEQ ID NO: 1017 - protein, 228 aa, Artificial sequence
  an artificially synthesized sequence
QSVLTQPPSASGTPGQRVTISCSGSSSNIGSNTVNWYQRLPGAAPQLLIYNNDQRPSGIPDRFSGSKSGTSGSLVISGLQSEDEADYYCASWDDSLNGRVFGGGTKLTVLTSYTGRSANPSGGQPKAAPSVTLFPPSSEELQANKATLVCLISDFYPGAVTVAWKADSSPVKAGVETTTPSKQSNNKYAASSYLSLTPEQWKSHRSYSCQVTHEGSTVEKTVAPTECS

SEQ ID NO: 1018 - protein, 228 aa, Artificial sequence
  an artificially synthesized sequence
QSVLTQPPSASGTPGQRVTISCSGSSSNIGSNTVNWYQRLPGAAPQLLIYNNDQRPSGIPDRFSGSKSGTSGSLVISGLQSEDEADYYCASWDDSLNGRVFGGGTKLTVLTSYSGRSAIPSGGQPKAAPSVTLFPPSSEELQANKATLVCLISDFYPGAVTVAWKADSSPVKAGVETTTPSKQSNNKYAASSYLSLTPEQWKSHRSYSCQVTHEGSTVEKTVAPTECS

SEQ ID NO: 1019 - protein, 228 aa, Artificial sequence
  an artificially synthesized sequence
QSVLTQPPSASGTPGQRVTISCSGSSSNIGSNTVNWYQRLPGAAPQLLIYNNDQRPSGIPDRFSGSKSGTSGSLVISGLQSEDEADYYCASWDDSLNGRVFGGGTKLTVLTSISGRSANYSGGQPKAAPSVTLFPPSSEELQANKATLVCLISDFYPGAVTVAWKADSSPVKAGVETTTPSKQSNNKYAASSYLSLTPEQWKSHRSYSCQVTHEGSTVEKTVAPTECS

SEQ ID NO: 1020 - protein, 228 aa, Artificial sequence
  an artificially synthesized sequence
QSVLTQPPSASGTPGQRVTISCSGSSSNIGSNTVNWYQRLPGAAPQLLIYNNDQRPSGIPDRFSGSKSGTSGSLVISGLQSEDEADYYCASWDDSLNGRVFGGGTKLTVLTSPSGRSAGPSGGQPKAAPSVTLFPPSSEELQANKATLVCLISDFYPGAVTVAWKADSSPVKAGVETTTPSKQSNNKYAASSYLSLTPEQWKSHRSYSCQVTHEGSTVEKTVAPTECS

SEQ ID NO: 1021 - protein, 228 aa, Artificial sequence
  an artificially synthesized sequence
QSVLTQPPSASGTPGQRVTISCSGSSSNIGSNTVNWYQRLPGAAPQLLIYNNDQRPSGIPDRFSGSKSGTSGSLVISGLQSEDEADYYCASWDDSLNGRVFGGGTKLTVLTSYTGRSAVPSGGQPKAAPSVTLFPPSSEELQANKATLVCLISDFYPGAVTVAWKADSSPVKAGVETTTPSKQSNNKYAASSYLSLTPEQWKSHRSYSCQVTHEGSTVEKTVAPTECS

SEQ ID NO: 1022 - protein, 228 aa, Artificial sequence
  an artificially synthesized sequence
QSVLTQPPSASGTPGQRVTISCSGSSSNIGSNTVNWYQRLPGAAPQLLIYNNDQRPSGIPDRFSGSKSGTSGSLVISGLQSEDEADYYCASWDDSLNGRVFGGGTKLTVLTSYTGRSAVYSGGQPKAAPSVTLFPPSSEELQANKATLVCLISDFYPGAVTVAWKADSSPVKAGVETTTPSKQSNNKYAASSYLSLTPEQWKSHRSYSCQVTHEGSTVEKTVAPTECS

SEQ ID NO: 1023 - protein, 228 aa, Artificial sequence
  an artificially synthesized sequence
QSVLTQPPSASGTPGQRVTISCSGSSSNIGSNTVNWYQRLPGAAPQLLIYNNDQRPSGIPDRFSGSKSGTSGSLVISGLQSEDEADYYCASWDDSLNGRVFGGGTKLTVLTSYTGRSAVVSGGQPKAAPSVTLFPPSSEELQANKATLVCLISDFYPGAVTVAWKADSSPVKAGVETTTPSKQSNNKYAASSYLSLTPEQWKSHRSYSCQVTHEGSTVEKTVAPTECS

SEQ ID NO: 1024 - protein, 228 aa, Artificial sequence
  an artificially synthesized sequence
QSVLTQPPSASGTPGQRVTISCSGSSSNIGSNTVNWYQRLPGAAPQLLIYNNDQRPSGIPDRFSGSKSGTSGSLVISGLQSEDEADYYCASWDDSLNGRVFGGGTKLTVLTSYTGRSAVHSGGQPKAAPSVTLFPPSSEELQANKATLVCLISDFYPGAVTVAWKADSSPVKAGVETTTPSKQSNNKYAASSYLSLTPEQWKSHRSYSCQVTHEGSTVEKTVAPTECS

SEQ ID NO: 1025 - protein, 228 aa, Artificial sequence
  an artificially synthesized sequence
QSVLTQPPSASGTPGQRVTISCSGSSSNIGSNTVNWYQRLPGAAPQLLIYNNDQRPSGIPDRFSGSKSGTSGSLVISGLQSEDEADYYCASWDDSLNGRVFGGGTKLTVLISYSGRSAVPIGGQPKAAPSVTLFPPSSEELQANKATLVCLISDFYPGAVTVAWKADSSPVKAGVETTTPSKQSNNKYAASSYLSLTPEQWKSHRSYSCQVTHEGSTVEKTVAPTECS

SEQ ID NO: 1026 - protein, 228 aa, Artificial sequence
  an artificially synthesized sequence
QSVLTQPPSASGTPGQRVTISCSGSSSNIGSNTVNWYQRLPGAAPQLLIYNNDQRPSGIPDRFSGSKSGTSGSLVISGLQSEDEADYYCASWDDSLNGRVFGGGTKLTVLISPSGRSANIIGGQPKAAPSVTLFPPSSEELQANKATLVCLISDFYPGAVTVAWKADSSPVKAGVETTTPSKQSNNKYAASSYLSLTPEQWKSHRSYSCQVTHEGSTVEKTVAPTECS

SEQ ID NO: 1027 - protein, 228 aa, Artificial sequence
  an artificially synthesized sequence
QSVLTQPPSASGTPGQRVTISCSGSSSNIGSNTVNWYQRLPGAAPQLLIYNNDQRPSGIPDRFSGSKSGTSGSLVISGLQSEDEADYYCASWDDSLNGRVFGGGTKLTVLISPSGRSANFIGGQPKAAPSVTLFPPSSEELQANKATLVCLISDFYPGAVTVAWKADSSPVKAGVETTTPSKQSNNKYAASSYLSLTPEQWKSHRSYSCQVTHEGSTVEKTVAPTECS

SEQ ID NO: 1028 - protein, 228 aa, Artificial sequence
  an artificially synthesized sequence
QSVLTQPPSASGTPGQRVTISCSGSSSNIGSNTVNWYQRLPGAAPQLLIYNNDQRPSGIPDRFSGSKSGTSGSLVISGLQSEDEADYYCASWDDSLNGRVFGGGTKLTVLISPTGRSANPIGGQPKAAPSVTLFPPSSEELQANKATLVCLISDFYPGAVTVAWKADSSPVKAGVETTTPSKQSNNKYAASSYLSLTPEQWKSHRSYSCQVTHEGSTVEKTVAPTECS

SEQ ID NO: 1029 - protein, 228 aa, Artificial sequence
  an artificially synthesized sequence
QSVLTQPPSASGTPGQRVTISCSGSSSNIGSNTVNWYQRLPGAAPQLLIYNNDQRPSGIPDRFSGSKSGTSGSLVISGLQSEDEADYYCASWDDSLNGRVFGGGTKLTVLISPSGRSAIPIGGQPKAAPSVTLFPPSSEELQANKATLVCLISDFYPGAVTVAWKADSSPVKAGVETTTPSKQSNNKYAASSYLSLTPEQWKSHRSYSCQVTHEGSTVEKTVAPTECS

SEQ ID NO: 1030 - protein, 228 aa, Artificial sequence
  an artificially synthesized sequence
QSVLTQPPSASGTPGQRVTISCSGSSSNIGSNTVNWYQRLPGAAPQLLIYNNDQRPSGIPDRFSGSKSGTSGSLVISGLQSEDEADYYCASWDDSLNGRVFGGGTKLTVLISYTGRSANPIGGQPKAAPSVTLFPPSSEELQANKATLVCLISDFYPGAVTVAWKADSSPVKAGVETTTPSKQSNNKYAASSYLSLTPEQWKSHRSYSCQVTHEGSTVEKTVAPTECS

SEQ ID NO: 1031 - protein, 228 aa, Artificial sequence
  an artificially synthesized sequence
QSVLTQPPSASGTPGQRVTISCSGSSSNIGSNTVNWYQRLPGAAPQLLIYNNDQRPSGIPDRFSGSKSGTSGSLVISGLQSEDEADYYCASWDDSLNGRVFGGGTKLTVLISYSGRSAIPIGGQPKAAPSVTLFPPSSEELQANKATLVCLISDFYPGAVTVAWKADSSPVKAGVETTTPSKQSNNKYAASSYLSLTPEQWKSHRSYSCQVTHEGSTVEKTVAPTECS

SEQ ID NO: 1032 - protein, 228 aa, Artificial sequence
  an artificially synthesized sequence
QSVLTQPPSASGTPGQRVTISCSGSSSNIGSNTVNWYQRLPGAAPQLLIYNNDQRPSGIPDRFSGSKSGTSGSLVISGLQSEDEADYYCASWDDSLNGRVFGGGTKLTVLISISGRSANYIGGQPKAAPSVTLFPPSSEELQANKATLVCLISDFYPGAVTVAWKADSSPVKAGVETTTPSKQSNNKYAASSYLSLTPEQWKSHRSYSCQVTHEGSTVEKTVAPTECS

SEQ ID NO: 1033 - protein, 228 aa, Artificial sequence
  an artificially synthesized sequence
QSVLTQPPSASGTPGQRVTISCSGSSSNIGSNTVNWYQRLPGAAPQLLIYNNDQRPSGIPDRFSGSKSGTSGSLVISGLQSEDEADYYCASWDDSLNGRVFGGGTKLTVLISPSGRSAGPIGGQPKAAPSVTLFPPSSEELQANKATLVCLISDFYPGAVTVAWKADSSPVKAGVETTTPSKQSNNKYAASSYLSLTPEQWKSHRSYSCQVTHEGSTVEKTVAPTECS

SEQ ID NO: 1034 - protein, 228 aa, Artificial sequence
  an artificially synthesized sequence
QSVLTQPPSASGTPGQRVTISCSGSSSNIGSNTVNWYQRLPGAAPQLLIYNNDQRPSGIPDRFSGSKSGTSGSLVISGLQSEDEADYYCASWDDSLNGRVFGGGTKLTVLISYTGRSAVPIGGQPKAAPSVTLFPPSSEELQANKATLVCLISDFYPGAVTVAWKADSSPVKAGVETTTPSKQSNNKYAASSYLSLTPEQWKSHRSYSCQVTHEGSTVEKTVAPTECS

SEQ ID NO: 1035 - protein, 228 aa, Artificial sequence
  an artificially synthesized sequence
QSVLTQPPSASGTPGQRVTISCSGSSSNIGSNTVNWYQRLPGAAPQLLIYNNDQRPSGIPDRFSGSKSGTSGSLVISGLQSEDEADYYCASWDDSLNGRVFGGGTKLTVLISYTGRSAVYIGGQPKAAPSVTLFPPSSEELQANKATLVCLISDFYPGAVTVAWKADSSPVKAGVETTTPSKQSNNKYAASSYLSLTPEQWKSHRSYSCQVTHEGSTVEKTVAPTECS

SEQ ID NO: 1036 - protein, 228 aa, Artificial sequence
  an artificially synthesized sequence
QSVLTQPPSASGTPGQRVTISCSGSSSNIGSNTVNWYQRLPGAAPQLLIYNNDQRPSGIPDRFSGSKSGTSGSLVISGLQSEDEADYYCASWDDSLNGRVFGGGTKLTVLISYTGRSAVVIGGQPKAAPSVTLFPPSSEELQANKATLVCLISDFYPGAVTVAWKADSSPVKAGVETTTPSKQSNNKYAASSYLSLTPEQWKSHRSYSCQVTHEGSTVEKTVAPTECS

SEQ ID NO: 1037 - protein, 228 aa, Artificial sequence
  an artificially synthesized sequence
QSVLTQPPSASGTPGQRVTISCSGSSSNIGSNTVNWYQRLPGAAPQLLIYNNDQRPSGIPDRFSGSKSGTSGSLVISGLQSEDEADYYCASWDDSLNGRVFGGGTKLTVLISYTGRSAVHIGGQPKAAPSVTLFPPSSEELQANKATLVCLISDFYPGAVTVAWKADSSPVKAGVETTTPSKQSNNKYAASSYLSLTPEQWKSHRSYSCQVTHEGSTVEKTVAPTECS

SEQ ID NO: 1038 - protein, 228 aa, Artificial sequence
  an artificially synthesized sequence
QSVLTQPPSASGTPGQRVTISCSGSSSNIGSNTVNWYQRLPGAAPQLLIYNNDQRPSGIPDRFSGSKSGTSGSLVISGLQSEDEADYYCASWDDSLNGRVFGGGTKLTVLYSYSGRSAVPIGGQPKAAPSVTLFPPSSEELQANKATLVCLISDFYPGAVTVAWKADSSPVKAGVETTTPSKQSNNKYAASSYLSLTPEQWKSHRSYSCQVTHEGSTVEKTVAPTECS

SEQ ID NO: 1039 - protein, 228 aa, Artificial sequence
  an artificially synthesized sequence
QSVLTQPPSASGTPGQRVTISCSGSSSNIGSNTVNWYQRLPGAAPQLLIYNNDQRPSGIPDRFSGSKSGTSGSLVISGLQSEDEADYYCASWDDSLNGRVFGGGTKLTVLYSPSGRSANIIGGQPKAAPSVTLFPPSSEELQANKATLVCLISDFYPGAVTVAWKADSSPVKAGVETTTPSKQSNNKYAASSYLSLTPEQWKSHRSYSCQVTHEGSTVEKTVAPTECS

SEQ ID NO: 1040 - protein, 228 aa, Artificial sequence
  an artificially synthesized sequence
QSVLTQPPSASGTPGQRVTISCSGSSSNIGSNTVNWYQRLPGAAPQLLIYNNDQRPSGIPDRFSGSKSGTSGSLVISGLQSEDEADYYCASWDDSLNGRVFGGGTKLTVLYSPSGRSANFIGGQPKAAPSVTLFPPSSEELQANKATLVCLISDFYPGAVTVAWKADSSPVKAGVETTTPSKQSNNKYAASSYLSLTPEQWKSHRSYSCQVTHEGSTVEKTVAPTECS

SEQ ID NO: 1041 - protein, 228 aa, Artificial sequence
  an artificially synthesized sequence
QSVLTQPPSASGTPGQRVTISCSGSSSNIGSNTVNWYQRLPGAAPQLLIYNNDQRPSGIPDRFSGSKSGTSGSLVISGLQSEDEADYYCASWDDSLNGRVFGGGTKLTVLYSPTGRSANPIGGQPKAAPSVTLFPPSSEELQANKATLVCLISDFYPGAVTVAWKADSSPVKAGVETTTPSKQSNNKYAASSYLSLTPEQWKSHRSYSCQVTHEGSTVEKTVAPTECS

SEQ ID NO: 1042 - protein, 228 aa, Artificial sequence
  an artificially synthesized sequence
QSVLTQPPSASGTPGQRVTISCSGSSSNIGSNTVNWYQRLPGAAPQLLIYNNDQRPSGIPDRFSGSKSGTSGSLVISGLQSEDEADYYCASWDDSLNGRVFGGGTKLTVLYSPSGRSAIPIGGQPKAAPSVTLFPPSSEELQANKATLVCLISDFYPGAVTVAWKADSSPVKAGVETTTPSKQSNNKYAASSYLSLTPEQWKSHRSYSCQVTHEGSTVEKTVAPTECS

SEQ ID NO: 1043 - protein, 228 aa, Artificial sequence
  an artificially synthesized sequence
QSVLTQPPSASGTPGQRVTISCSGSSSNIGSNTVNWYQRLPGAAPQLLIYNNDQRPSGIPDRFSGSKSGTSGSLVISGLQSEDEADYYCASWDDSLNGRVFGGGTKLTVLYSYTGRSANPIGGQPKAAPSVTLFPPSSEELQANKATLVCLISDFYPGAVTVAWKADSSPVKAGVETTTPSKQSNNKYAASSYLSLTPEQWKSHRSYSCQVTHEGSTVEKTVAPTECS

SEQ ID NO: 1044 - protein, 228 aa, Artificial sequence
  an artificially synthesized sequence
QSVLTQPPSASGTPGQRVTISCSGSSSNIGSNTVNWYQRLPGAAPQLLIYNNDQRPSGIPDRFSGSKSGTSGSLVISGLQSEDEADYYCASWDDSLNGRVFGGGTKLTVLYSYSGRSAIPIGGQPKAAPSVTLFPPSSEELQANKATLVCLISDFYPGAVTVAWKADSSPVKAGVETTTPSKQSNNKYAASSYLSLTPEQWKSHRSYSCQVTHEGSTVEKTVAPTECS

SEQ ID NO: 1045 - protein, 228 aa, Artificial sequence
  an artificially synthesized sequence
QSVLTQPPSASGTPGQRVTISCSGSSSNIGSNTVNWYQRLPGAAPQLLIYNNDQRPSGIPDRFSGSKSGTSGSLVISGLQSEDEADYYCASWDDSLNGRVFGGGTKLTVLYSISGRSANYIGGQPKAAPSVTLFPPSSEELQANKATLVCLISDFYPGAVTVAWKADSSPVKAGVETTTPSKQSNNKYAASSYLSLTPEQWKSHRSYSCQVTHEGSTVEKTVAPTECS

SEQ ID NO: 1046 - protein, 228 aa, Artificial sequence
  an artificially synthesized sequence
QSVLTQPPSASGTPGQRVTISCSGSSSNIGSNTVNWYQRLPGAAPQLLIYNNDQRPSGIPDRFSGSKSGTSGSLVISGLQSEDEADYYCASWDDSLNGRVFGGGTKLTVLYSPSGRSAGPIGGQPKAAPSVTLFPPSSEELQANKATLVCLISDFYPGAVTVAWKADSSPVKAGVETTTPSKQSNNKYAASSYLSLTPEQWKSHRSYSCQVTHEGSTVEKTVAPTECS

SEQ ID NO: 1047 - protein, 228 aa, Artificial sequence
  an artificially synthesized sequence
QSVLTQPPSASGTPGQRVTISCSGSSSNIGSNTVNWYQRLPGAAPQLLIYNNDQRPSGIPDRFSGSKSGTSGSLVISGLQSEDEADYYCASWDDSLNGRVFGGGTKLTVLYSYTGRSAVPIGGQPKAAPSVTLFPPSSEELQANKATLVCLISDFYPGAVTVAWKADSSPVKAGVETTTPSKQSNNKYAASSYLSLTPEQWKSHRSYSCQVTHEGSTVEKTVAPTECS

SEQ ID NO: 1048 - protein, 228 aa, Artificial sequence
  an artificially synthesized sequence
QSVLTQPPSASGTPGQRVTISCSGSSSNIGSNTVNWYQRLPGAAPQLLIYNNDQRPSGIPDRFSGSKSGTSGSLVISGLQSEDEADYYCASWDDSLNGRVFGGGTKLTVLYSYTGRSAVYIGGQPKAAPSVTLFPPSSEELQANKATLVCLISDFYPGAVTVAWKADSSPVKAGVETTTPSKQSNNKYAASSYLSLTPEQWKSHRSYSCQVTHEGSTVEKTVAPTECS

SEQ ID NO: 1049 - protein, 228 aa, Artificial sequence
  an artificially synthesized sequence
QSVLTQPPSASGTPGQRVTISCSGSSSNIGSNTVNWYQRLPGAAPQLLIYNNDQRPSGIPDRFSGSKSGTSGSLVISGLQSEDEADYYCASWDDSLNGRVFGGGTKLTVLYSYTGRSAVVIGGQPKAAPSVTLFPPSSEELQANKATLVCLISDFYPGAVTVAWKADSSPVKAGVETTTPSKQSNNKYAASSYLSLTPEQWKSHRSYSCQVTHEGSTVEKTVAPTECS

SEQ ID NO: 1050 - protein, 228 aa, Artificial sequence
  an artificially synthesized sequence
QSVLTQPPSASGTPGQRVTISCSGSSSNIGSNTVNWYQRLPGAAPQLLIYNNDQRPSGIPDRFSGSKSGTSGSLVISGLQSEDEADYYCASWDDSLNGRVFGGGTKLTVLYSYTGRSAVHIGGQPKAAPSVTLFPPSSEELQANKATLVCLISDFYPGAVTVAWKADSSPVKAGVETTTPSKQSNNKYAASSYLSLTPEQWKSHRSYSCQVTHEGSTVEKTVAPTECS

SEQ ID NO: 1051 - protein, 462 aa, Artificial sequence
  an artificially synthesized sequence
QVQLVQSGAEVKKPGSSVTVSCKASGGTFSSFSITWLRQAPGQGLEWMGEITPMFGIANYAQKFQGRVTISADESTSTAYMELSGLTSEDTAMYYCARDGRFDVSDLLTDKPKVTINYNGMDVWGQGTLVTVSSASTKGPSVFPLAPSSKSTSGGTAALGCLVKDYFPEPVTVSWNSGALTSGVHTFPAVLQSSGLYSLSSVVTVPSSSLGTQTYICNVNHKPSNTKVDKKVEPKSCDKTHTCPPCPAPELRGGPKVFLFPPKPKDTLMISRTPEVTCVVVDVSHEDPEVKFNWYVDGVEVHNAKTKPREEQYASTYRVVSVLTVLHQDWLNGKEYKCKVSNKALPAPIEKTISKAKGQPREPQVYTLPPSRKEMTKNQVSLTCLVKGFYPSDIAVEWESNGQPENNYKTTPPYLDSDGSFFLYSKLTVDKSRWQQGNVFSCSVMHEALHNHYTQKSLSLSP

SEQ ID NO: 1052 - protein, 12 aa, Artificial sequence
  an artificially synthesized sequence
TSYTGRSAVPRG

SEQ ID NO: 1053 - protein, 12 aa, Artificial sequence
  an artificially synthesized sequence
TSYSGRSAVVRG

SEQ ID NO: 1054 - protein, 12 aa, Artificial sequence
  an artificially synthesized sequence
TSYTGRSAVYRG

SEQ ID NO: 1055 - protein, 12 aa, Artificial sequence
  an artificially synthesized sequence
TSYTGRSAVHRG

SEQ ID NO: 1056 - protein, 228 aa, Artificial sequence; identical to SEQ ID NO: 817
  an artificially synthesized sequence

SEQ ID NO: 1057 - protein, 228 aa, Artificial sequence; identical to SEQ ID NO: 819
  an artificially synthesized sequence

SEQ ID NO: 1058 - protein, 228 aa, Artificial sequence; identical to SEQ ID NO: 821
  an artificially synthesized sequence

SEQ ID NO: 1059 - protein, 228 aa, Artificial sequence; identical to SEQ ID NO: 823
  an artificially synthesized sequence

SEQ ID NO: 1060 - protein, 444 aa, Artificial sequence
  an artificially synthesized sequence
QVQLQQSGPQLVRPGASVKISCKASGYSFTSYWMHWVNQRPGQGLEWIGMIDPSYSETRLNQKFKDKATLTVDKSSSTAYMQLSSPTSEDSAVYYCALYGNYFDYWGQGTTLTVSSASTKGPSVFPLAPSSKSTSGGTAALGCLVKDYFPEPVTVSWNSGALTSGVHTFPAVLQSSGLYSLSSVVTVPSSSLGTQTYICNVNHKPSNTKVDKKVEPKSCDKTHTCPPCPAPELRGGPKVFLFPPKPKDTLMISRTPEVTCVVVDVSHEDPEVKFNWYVDGVEVHNAKTKPREEQYASTYRVVSVLTVLHQDWLNGKEYKCKVSNKALPAPIEKTISKAKGQPREPQVYTLPPSREEMTKNQVSLTCLVKGFYPSDIAVEWESNGQPENNYKTTPPYLDSDGSFFLYSKLTVDKSRWQQGNVFSCSVMHEALHNHYTQESLSLSP

SEQ ID NO: 1061 - protein, 214 aa, Artificial sequence
  an artificially synthesized sequence
DIQMTQSSSSFSVSLGDRVTITCKASEDIYNRLAWYQQKPGNAPRLLISGATSLETGVPSRFSGSGSGKDYTLSITSLQTEDVATYYCQQYWSTPYTFGGGTKLEVKRTVAAPSVFIFPPSDEQLKSGTASVVCLLNNFYPREAKVQWKVDNALQSGNSQESVTEQDSKDSTYSLSSTLTLSKADYEKHKVYACEVTHQGLSSPVTKSFNRGEC
